(19) United States
(12) Patent Application Publication
(10) Pub. No.: US 2016/0339066 A1
(43) Pub. Date: Nov. 24, 2016

(54) ONCOLYTIC VIRUS ADJUNCT THERAPY WITH AGENTS THAT INCREASE VIRUS INFECTIVITY

(71) Applicant: GENELUX CORPORATION, San Diego, CA (US)

(72) Inventors: Aladar A. SZALAY, Highland, CA (US); Joseph CAPPELLO, San Diego, CA (US); Nanhai G. CHEN, San Diego, CA (US); Boris MINEV, San Diego, CA (US)

(21) Appl. No.: 15/109,214

(22) PCT Filed: Dec. 31, 2014
(86) PCT No.: PCT/US2014/073088

§ 371 Date: Jun. 30, 2016

Related U.S. Application Data
(60) Provisional application No. 61/964,383, filed on Jan. 2, 2014.

(51) Int. Cl. A61K 35/768; A61K 47/44; A61K 39/395

(52) U.S. Cl. CPC A61K 35/768; A61K 39/3955; A61K 47/44; C12N 2710/24132; A61K 2039/505

(57) ABSTRACT

Provided are adjunct therapies for use in combinations and compositions with an oncolytic virus, such as a vaccinia virus. The adjunct therapies include co-administration and co-formulation of a complement inhibitor and/or a lipid emulsion composition with the oncolytic virus. Also provided herein are therapeutic methods using the adjunct therapies for treatment of disease and conditions employing an oncolytic therapeutic virus, such as for the treatment of hyperproliferative diseases or conditions including tumors or cancers.

### RELATED APPLICATIONS

[0001] Benefit of priority is claimed to U.S. provisional application Ser. No. 61/964,383, filed Jan. 2, 2014, to Aladar A. Szalay, Joseph Cappello, Nanhai G. Chen and Boris Minev, entitled “ONCOLYTIC VIRUS ADJUNCT THERAPY WITH AGENTS THAT INCREASE VIRUS INFECTIVITY.” Where permitted, the subject matter of U.S. provisional application Ser. No. 61/964,383 is incorporated by reference in its entirety.

### INCORPORATION BY REFERENCE OF SEQUENCE LISTING PROVIDED ELECTRONICALLY

[0002] An electronic version of the Sequence Listing is filed herewith, the contents of which are incorporated by reference in their entirety. The electronic file was created on Dec. 30, 2014, is 4,434 kilobytes in size, and titled 4847SEQPC1.txt.

### FIELD OF THE INVENTION

[0003] Provided are adjunct therapies for use in combinations or compositions with an oncolytic virus, such as a vaccinia virus, to increase infectivity of the virus. The adjunct therapies include co-administration or co-formulation of a complement inhibitor and/or a lipid emulsion composition. Also provided herein are therapeutic methods using the adjunct therapies for treatment of disease and conditions with employing the combinations, compositions and methods, such as for the treatment of hyperproliferative diseases and conditions including tumors and cancers.

### BACKGROUND

[0004] Oncolytic viral therapy is effected by administering a virus that accumulates in tumor cells and replicates in the tumor cells. For example, vaccinia is an oncolytic virus that accumulates in wounds and tumors. By virtue of replication in the cells, and optional delivery of therapeutic agents, tumor cells are lysed, and the tumor shrinks and can be eliminated. Vaccinia viruses are typically administered systemically or locally. There still exists a need for improved or alternative methods of administering vaccinia viruses for various therapeutic and diagnostic applications. Accordingly, it is among the objects herein, to provide virus compositions that can be employed for diagnostic and/or therapeutic methods.

### SUMMARY

[0005] Provided are methods, uses, compositions, combinations for increasing the infectivity of oncolytic viruses, such as vaccinia viruses. Infectivity is increased by treating a subject with an anti-complement molecule, particularly an antibody, such as an anti-C5 antibody and/or other complement inhibitors known to those of skill in the art. Treatment can be effected simultaneously with administration of the virus, before, after and intermittently with administration of the viruses. Uses of the antibodies for such treatment, including treatment of tumors are provided. Infectivity can be increased by pretreatment, such as incubation, of the oncolytic viruses with a biocompatible lipid as described herein. The antibodies, biocompatible lipid compositions, and viruses include any and all described herein. Both modes of increasing infectivity can be employed together. These methods also can be used and combined with other methods for increasing infectivity as well as for use with viruses that are modified to have increased infectivity, such as, but not limited to, vaccinia viruses, such as vaccinia viruses with modified to increase the production of extracellular enveloped virus (EEV) forms. These include vaccinia virus in which the A34R polypeptide is modified, such as with the mutation K151E (see, U.S. Pat. No. 8,329,164, which describes vaccinia viruses with increased infectivity by virtue of modification of the virus).

[0006] Provided are uses of anti-complement molecules, such as antibodies, for increasing infectivity of oncolytic viruses. Anti-C5 antibodies, are used to increase the infectivity of oncolytic viruses, such as vaccinia viruses. Composition and combinations and kits containing the antibodies and viruses also are provided.

[0007] In particular, provided are methods and uses of an anti-complement component 5 (C5) antibody for increasing infectivity of an oncolytic virus. Anti-C5 antibodies, include, for example, eculizumab, pexelizumab, TSA12/22 or MB12/122, and variants thereof that bind to C5. The antibodies for all methods and uses provided herein can be full-length antibodies or binding fragments thereof, such as Fabs and single chain antibodies. The antibodies and oncolytic virus can be provided in separate compositions or in a single composition. The antibodies increase the effectiveness of the oncolytic virus, such as by increasing the infectivity of the virus. Infectivity can be assessed by any suitable method, including measuring titer of the virus in a body fluid, such as blood or serum. The antibody and virus can be administered separately, in the same composition, sequentially or intermittently or in any suitable regimen. The antibody can be administered before the virus is administered or intermittently therewith or after the virus is ad ministered. The oncolytic virus can be pretreated with a lipid emulsion containing a biocompatible lipid that is comprised of fatty acids and/or fatty acid derivatives. The lipid emulsion is as described herein and comprises a biocompatible lipid that is comprised of fatty acids and/or fatty acid derivatives, wherein the composition is an emulsion. Also provided are the compositions containing an oncolytic virus; and an anti-complement component 5 (C5) antibody, such as, but not limited to, eculizumab, pexelizumab, TSA12/22 or MB12/122, and variants thereof that bind to C5 and antigen binding fragments thereof. The composition containing the antibody and the virus can also include the biocompatible lipid component that is comprised of fatty acids and/or fatty acid derivatives

[0008] In general any therapeutic virus can be used in methods, uses, compositions and combinations provided herein. These include oncolytic viruses, and their use for treatment of tumors, as well as diagnosis and monitoring treatment. The viruses include any described herein, including, but not limited to, the LIVP strains of vaccinia virus described herein and known to those of skill in the art. such as other strains of vaccinia virus, herpes simplex viruses, oncolytic adenoviruses, measles virus, reoviruses and others.

[0009] Provided are compositions that contain therapeutic viruses, particularly therapeutic oncolytic viruses, and methods of treatment by administering or using the compositions. The compositions, which contain a biocompatible lipid and/or lipid-treated virus, typically are emulsions. The compositions and/or methods provide the viruses whereby the infectivity of the virus is increased. It is increased such by virtue of increased half-life and/or changes to the virus that protect it from the immune system or enhance interaction and/or uptake by target cells, such as cells that are the target of therapy with therapeutic oncolytic viruses. Target cells include, but are not limited to, tumor cells, circulating tumor cells, metastasizing tumor cells, cells in wounded or inflamed tissue. Target cells include cells in subjects to whom the composition is administered and also include, in vitro cell lines, and ex vivo cells, including cells for cell therapy, stem cells and other such cells.

[0010] Therapeutic oncolytic viruses include, but are not limited to, vaccinia viruses, measles viruses, oncolytic adenoviruses, vesicular stomatitis virus, herpes simplex viruses and other oncolytic viruses. Exemplary of such viruses are LIVP, Wyeth and Copenhagen strain vaccinia virus, such as JX594 and derivatives thereof and the GLV-ONC1 (GLV-1h68) and derivatives thereof, and clonal strains of LIVP and Copenhagen. Other exemplary viruses include the Onyx strains of adenovirus. By increasing infectivity, the amount of virus that infects target cells is effectively increased, and it is increased without increasing dosage.

[0011] Provided are compositions that contain a therapeutic oncolytic virus, or mixture thereof, and a biocompatible lipid component. Such compositions generally are emulsions. Also provided are lipid-treated therapeutic oncolytic viruses. The lipid-treated viruses include viruses that have been contacted with a composition containing a biocompatible lipid, and, are formulated for systemic administration or local administration, such as by parenteral administration, including intravenous administration, and by peritoneal administration.

[0012] Lipids include any known to those of skill in the art that can be administered systemically. These include vegetable oils, such as soybean oil, which contain a mixture of various lipids. The lipid component includes, but is not limited to, fatty acids and fatty acid derivatives, such as triglycerides, diglycerides, monoglycerides, phospholipids, and mixtures thereof. The triglycerides and the triglycerides are long-chain triglycerides (LCTs), medium-chain triglycerides (MCTs) and mixtures thereof. Exemplary long-chain triglycerides are linoleate, oleate, palmitate, linolenate, stearate and mixtures thereof. Medium-chain triglycerides include caprylic acid and capric acid.

[0013] The lipids can be provided as oils, including plant oil, vegetable oil, animal oil, fish oil, mineral oil, chemically synthesized oil and mixtures thereof. Plant and vegetable oils include soybean oil, cottonseed oil, safflower oil, corn oil, coconut oil, sesame oil, peanut oil, olive oil, castor oil and mixtures thereof.

[0014] Exemplary compositions are emulsions that contain: a biocompatible lipid component in an amount between 0.001% and 50%, inclusive, such at least 0.0002%, 0.2%, 2% and 40%-50%, inclusive, by weight, of the lipid emulsion; and optionally an emulsifier in an amount between 0.2% and 5%, inclusive, by weight, of the lipid emulsion; and the remainder an aqueous phase in an amount between 50% and 98%, inclusive, by weight, of the lipid emulsion. Emulsifiers are biocompatible and can be naturally-occurring emulsifier or synthetic emulsifiers, such as phospholipid derived from an egg or soy source, including, but not limited to, egg yolk phospholipids, hydrogenated egg yolk phospholipids, soybean phospholipids, hydrogenated soybean phospholipids and mixtures thereof. Exemplary of emulsifiers is lecithin. The concentration of the emulsifier as a wt % of the composition is between 0.0002% and 5%, 0.0002% and 2%, 0.0002% and 1%, 0.0002% and 0.2%, 0.0002% and 0.02%, 0.0002% and 0.002%, 0.002% and 2%, 0.002% and 1%, 0.002% and 0.2%, 0.002% and 0.02%, 0.02% and 2%, 0.02% and 1%, 0.02% and 0.2%, 0.2% and 5%, 0.2% and 2%, or 2% and 5%, each inclusive. Generally the concentration of the emulsifier is less than 2% wt % of the composition.

[0015] The aqueous phase typically is water or isotonic aqueous medium and contains the virus, particularly in a multiple dosage or single dosage concentration or amounts. Other components in the compositions, including tonicity modifiers, pH adjusters and other such components. For example, the compositions can contain a tonicity modifier, such as glycerin, in an amount between 0.00002%, 00001%, 0001%, 0.2% and 5%, inclusive, by weight of the emulsion, generally less than 2%. Exemplary tonicity modifiers include glycerin, sodium chloride, potassium chloride, mannitol, sucrose, lactose, fructose, maltose, dextrose, dextrose anhydrous, xylitol, sorbitol, propylene glycol, polyoxyethylated hydrocarbons, and C₆-C₂₀ saturated and unsaturated aliphatic acids.

[0016] Tonicity modifiers include, but are not limited to, glycerin, sodium chloride, potassium chloride, mannitol, sucrose, lactose, fructose, maltose, dextrose, dextrose anhydrous, xylitol, sorbitol, propylene glycol, polyoxyethylated hydrocarbons, and C₆-C₂₀ saturated or unsaturated aliphatic acids. Concentrations of the tonicity modifier as a wt % of the composition is between 0.0002% and 5%, 0.0002% and 2%, 0.0002% and 1%, 0.0002% and 0.2%, 0.0002% and 0.02%, 0.0002% and 0.002%, 0.002% and 2%, 0.002% and 1%, 0.002% and 0.2%, 0.002% and 0.02%, 0.02% and 2%, 0.02% and 1%, 0.02% and 0.2%, 0.2% and 5%, 0.2% and 2%, or 2% and 5%, each inclusive.

[0017] The compositions contain an aqueous medium such as isotonic solutions selected from among Ringer's solution, Ringer's lactate solution, phosphate-buffered saline (PBS), TRIS-buffered saline (TBS), Hank's balanced salt solution (HBSS), Earle's balanced salt solution (EBSS), standard saline citrate (SSC), HEPES-buffered saline (HBS), Grey's balanced salt solution (GBSS), and normal saline (NaCl). The concentration of the aqueous phase can be between 40% and 99.9%, 50 and 99%, 60% and 99%, 70% and 99%, 80% and 99%, 90% and 99%, 70% and 95% or 80% and 90%, each inclusive.

[0018] Other exemplary compositions include lipid emulsions that contain: a biocompatible lipid component in a concentration between 10% and 30%, inclusive, by weight, of the lipid emulsion, wherein the biocompatible lipid component is selected from among soybean oil, safflower oil, olive oil, and mixtures thereof; an egg yolk phospholipid(s) in a concentration that is at or about 1.2% by weight, of the lipid emulsion; glycerin in a concentration between 2.25% and 2.5%, inclusive, by weight, of the lipid emulsion; and water in a concentration that is between 60% and 90%, inclusive, by weight, of the lipid emulsion. For example, the liquid emulsion comprises: 10%, 20% or 30% by weight soybean oil; 1.2% by weight egg yolk phospholipid; and 2.5% by weight glycerin.

[0019] To prepare the lipid-treated virus, the virus is contacted with the lipid, such as by incubation. Incubation is effected for a time sufficient to increase infectivity of the virus, such as for example, at least 5 minutes, 10 minutes, 15 minutes, 30 minutes, such as 30 minutes to 12 hours, 30 minutes to 6 hours, 30 minutes to 4 hours, 30 minutes to 2 hours, 30 minutes to 1 hours, 1 hour to 12 hours, 1 hour to 6 hours, 1 hour to 4 hours, 1 hour to 2 hours, 2 hours to 12 hours, 2 hours to 6 hours, 2 hours to 4 hours, 4 hours to 12 hours, 4 hours to 6 hours, or 6 hours to 12 hours. Incubation can be effected at any temperature at which the virus remains infective, such as, but are limited to, 0° to 42° C., inclusive, including for example, 32° C. to 40-45° C., at or about 35° C. to 42° C., typically at least 37° C.

[0020] The concentration of the biocompatible lipid component can be at a weight percentage (wt %) of the composition between 0.001% and 40%, inclusive, such as for example, 0.001% and 20%, 0.001% and 10%, 0.001% and 5%, 0.001% and 2%, 0.001% and 1%, 0.001% and 0.01%, 0.01% and 20%, 0.01% and 10%, 0.01% and 5%, 0.01% and 2%, 0.01% and 1%, 0.01% and 0.1%, 0.1% and 20%, 0.1% and 10%, 0.1% and 5%, 0.1% and 2%, 0.1% and 1%, 0.5% and 20%, 0.5% and 10%, 0.5% and 5%, 0.5% and 2%, 0.5% and 1%, 2% and 20%, 2% and 10%, 5% and 20%, 5% and 10%, or 10% and 20%, each inclusive.

[0021] Oncolytic viruses, as discussed above, include any therapeutic oncolytic virus, such, but not limited to, a Newcastle Disease virus, parvovirus, vaccinia virus, measles virus, reovirus, vesicular stomatitis virus (VSV), oncolytic adenoviruses, adeno-associated virus, poliovirus, herpes viruses, sindbis virus and seneca valley virus, and derivatives that that are modified to contain heterologous nucleic acid, including heterologous nucleic acid encoding a heterologous gene product.

[0022] Vaccinia viruses and related viruses include strains selected from among Lister, Western Reserve (WR), Copenhagen (Cop), Bern, Paris, Tashkent, Tian Tan, Wyeth (DRYVAX), IHD-J, IHD-W, Brighton, Ankara, CVA382, Modified Vaccinia Ankara (MVA), Dairen I, LC16m8, LC16M0, LIVP, ACAM2000, WR 65-16, Connaught, New York City Board of Health (NYCBH), EM-63 and NYVAC strain. Included are clonal strains of each as well as those containing heterologous nucleic acid.

[0023] Exemplary viruses are Copenhagen and Lister strains, such as LIVP, including clonal strains thereof. Heterologous nucleic acid includes that encoding a therapeutic gene product and/or a reporter gene and/or promoter or regulatory region. Heterologous gene product is selected from among an anticancer agent, an antimetastatic agent, an antiangiogenic agent, an immunomodulatory molecule, an antigen, a cell matrix degradative gene, genes for tissue regeneration and reprogramming human somatic cells to pluripotency, enzymes that modify a substrate to produce a detectable product or signal or are detectable by antibodies, proteins that can bind a contrasting agent, genes for optical imaging or detection, genes for PET imaging and genes for MRI imaging. For example, the heterologous gene product is a therapeutic agent selected from among a hormone, a growth factor, a cytokine, a chemokine, a costimulatory molecule, a ribozyme, a transporter protein, a single chain antibody, such an anti-VEGF or anti-VEGFR, or anti-EGFR antibody, an antisense or ds RNA or other RNA product, a prodrug converting enzyme, an siRNA, a microRNA, a toxin, an antitumor oligopeptide, a mitosis inhibitor protein, an antimitotic oligopeptide, an anti-cancer polypeptide antibiotic, an angiogenesis inhibitor, a tumor suppressor, a cytotoxic protein, a cytostatic protein and a tissue factor.

[0024] The oncolytic viruses are present in the composition in multidose and single dosage amounts, including, but not limited to between or between about 1×10⁵ and 1×10¹² pfu, 1×10⁶ to 1×10¹⁰ pfu, or 1×10⁷ to 1×10¹⁰ pfu, each inclusive, such as at least or about at least or 1×10⁶, 1×10⁷, 1×10⁸, 1×10⁹, 2×10⁹, 3×10⁹, 4×10⁹, 5×10⁹ pfu, 1×10¹⁰ pfu.

[0025] Another exemplary compositions contains an oncolytic virus in an amount that is between or between about 1×10⁶ to 1×10¹⁰ pfu, inclusive; a biocompatible lipid component as a wt % of the composition of less than 10%; an emulsifier as a wt % of the composition of less than 2%; a tonicity modifier as a wt % of the composition of less than 2%; and an aqueous phase as a wt % of the composition that is greater than 85%. The virus typically is provided as part of the aqueous phase.

[0026] The volume of the composition can be any volume, and can be for single or multiple dosage administration, including, but not limited to, from or from about 0.01 mL to 100 mL, 0.1 mL to 100 mL, 1 mL to 100 mL, 10 mL to 100 mL, 0.01 mL to 10 mL, 0.1 mL to 10 mL, 1 mL to 10 mL, 0.02 mL to 20 mL, 0.05 mL to 5 mL, 0.5 mL to 50 mL, or 0.5 mL to 5 mL, each inclusive.

[0027] The infectivity of the virus can be manifested, such as by increased titer or half-life of the oncolytic virus when exposed to a bodily fluid, such as blood or serum. Infectivity can be increased by any amount, including, but not limited to, at least 1.1-fold, 1.2-fold, 1.3-fold, 1.4-fold, 1.5-fold, 1.6-fold, 1.7-fold, 1.8-fold, 1.9-fold, 2.0-fold, 2.5-fold, 3-fold, 4-fold, 5-fold, 6-fold, 7-fold, 8-fold, 9-fold, or 10-fold.

[0028] The compositions can be formulated for direct administration. They can be formulated for local or systemic injection, such as intravenous administration.

[0029] Also provided are combinations that include two compositions: a first composition comprising an oncolytic virus; and a second composition comprising a lipid. Typically the second composition is an emulsion. It can be provided as a lipid alone or a lipid with an emulsifier. In such cases the lipid component is up to 100% of the composition, and with the optional emulsifier in an amount sufficient to aid in emulsifying the lipid with the virus composition, which typically is an aqueous compositions.

[0030] The compositions can be formulated separately, or they can be combined. They can be administered separately or combined or administered sequentially. The oncolytic virus is any oncolytic virus, as described above. The lipid, which generally is provided as an emulsion composition contains a biocompatible lipid component and optionally an emulsifier. The lipid component is present any suitable concentration, typically from at least about or at 1% to 50%, such as, but not limited to, between 2% and 40%, 5% and 40%, or 10% and 30%, each inclusive. wherein the lipid component is comprised of fatty acids and/or fatty acid derivatives.

[0031] The lipid component can be any lipid or oil, such as soybean oil, which contains a mixture of various lipid components. As described above, the lipid component can be any lipid or mixture or source thereof known to those of skill in the art that can be administered systemically. These include vegetable oils, such as soybean oil, which contain a mixture of various lipids. The lipid component includes, but is not limited to, fatty acids and fatty acid derivatives, such as triglycerides, diglycerides, monoglycerides, phospholipids, and mixtures thereof. The triglycerides and the triglycerides are long-chain triglycerides (LCTs), medium-chain triglycerides (MCTs) and mixtures thereof. Exemplary long-chain triglycerides are linoleate, oleate, palmitate, linolenate, stearate and mixtures thereof. Medium-chain triglycerides include caprylic acid and capric acid.

[0032] The lipids can be provided as oils, including plant oil, vegetable oil, animal oil, fish oil, mineral oil, chemically synthesized oil and mixtures thereof. Plant and vegetable oils include soybean oil, cottonseed oil, safflower oil, corn oil, coconut oil, sesame oil, peanut oil, olive oil, castor oil and mixtures thereof.

[0033] Other exemplary compositions include lipid emulsions that contain: a biocompatible lipid component in a concentration between 1-50%, such as 10% and 30%, inclusive, by weight, of the lipid emulsion, wherein the biocompatible lipid component is selected from among soybean oil, safflower oil, olive oil, and mixtures thereof; an egg yolk phospholipid(s) in a concentration that is at or about 1.2% by weight, of the lipid emulsion; glycerin in a concentration between 2.25% and 2.5%, inclusive, by weight, of the lipid emulsion; and water in a concentration that is between 60% and 90%, inclusive, by weight, of the lipid emulsion. For example, the liquid emulsion comprises: 10%, 20% or 30% by weight soybean oil; 1.2% by weight egg yolk phospholipid; and 2.5% by weight glycerin.

[0034] Exemplary compositions are emulsions that contain: a biocompatible lipid component in an amount between 0.001% and 50%, inclusive, such at least 0.0002%, 0.2%, 2% and 40%-50%, inclusive, by weight, of the lipid emulsion; and optionally an emulsifier in an amount between 0.2% and 5%, inclusive, by weight, of the lipid emulsion; and the remainder an aqueous phase in an amount between 50% and 98%, inclusive, by weight, of the lipid emulsion. Emulsifiers are biocompatible and can be naturally-occurring emulsifier or synthetic emulsifiers, such as phospholipid derived from an egg or soy source, including, but not limited to, egg yolk phospholipids, hydrogenated egg yolk phospholipids, soybean phospholipids, hydrogenated soybean phospholipids and mixtures thereof. Exemplary of emulsifiers is lecithin. The concentration of the emulsifier as a wt % of the composition is between 0.0002% and 5%, 0.0002% and 2%, 0.0002% and 1%, 0.0002% and 0.2%, 0.0002% and 0.02%, 0.0002% and 0.002%, 0.002% and 2%, 0.002% and 1%, 0.002% and 0.2%, 0.002% and 0.02%, 0.02% and 2%, 0.02% and 1%, 0.02% and 0.2%, 0.2% and 5%, 0.2% and 2%, or 2% and 5%, each inclusive. Generally the concentration of the emulsifier is less than 2% wt % of the composition.

[0035] Other components in the compositions, including tonicity modifiers, pH adjusters and other such components. For example, the compositions can contain a tonicity modifier, such as glycerin, in an amount between 0.00002%, 00001%, 0001%, 0.2% and 5%, inclusive, by weight of the emulsion, generally less than 2%. Exemplary tonicity modifiers include glycerin, sodium chloride, potassium chloride, mannitol, sucrose, lactose, fructose, maltose, dextrose, dextrose anhydrous, xylitol, sorbitol, propylene glycol, polyoxyethylated hydrocarbons, and C₆-C₂₀ saturated and unsaturated aliphatic acids.

[0036] Tonicity modifiers include, but are not limited to, glycerin, sodium chloride, potassium chloride, mannitol, sucrose, lactose, fructose, maltose, dextrose, dextrose anhydrous, xylitol, sorbitol, propylene glycol, polyoxyethylated hydrocarbons, and C₆-C₂₀ saturated or unsaturated aliphatic acids. Concentrations of the tonicity modifier as a wt % of the composition is between 0.0002% and 5%, 0.0002% and 2%, 0.0002% and 1%, 0.0002% and 0.2%, 0.0002% and 0.02%, 0.0002% and 0.002%, 0.002% and 2%, 0.002% and 1%, 0.002% and 0.2%, 0.002% and 0.02%, 0.02% and 2%, 0.02% and 1%, 0.02% and 0.2%, 0.2% and 5%, 0.2% and 2%, or 2% and 5%, each inclusive.

[0037] The compositions contain an aqueous medium such as isotonic solutions selected from among Ringer's solution, Ringer's lactate solution, phosphate-buffered saline (PBS), TRIS-buffered saline (TBS), Hank's balanced salt solution (HBSS), Earle's balanced salt solution (EBSS), standard saline citrate (SSC), HEPES-buffered saline (HBS), Grey's balanced salt solution (GBSS), and normal saline (NaCl). The concentration of the aqueous phase can be between 40% and 99.9%, 50 and 99%, 60% and 99%, 70% and 99%, 80% and 99%, 90% and 99%, 70% and 95% or 80% and 90%, each inclusive.

[0038] The lipid compositions optionally include an emulsifier, such as a lecithin or other phospholipid. Emulsifiers are biocompatible and can be naturally-occurring emulsifier or synthetic emulsifiers, such as phospholipid derived from an egg or soy source, including, but not limited to, egg yolk phospholipids, hydrogenated egg yolk phospholipids, soybean phospholipids, hydrogenated soybean phospholipids and mixtures thereof. Exemplary of emulsifiers is lecithin. The concentration of the emulsifier as a wt % of the composition is between 0.0002% and 5%, 0.0002% and 2%, 0.0002% and 1%, 0.0002% and 0.2%, 0.0002% and 0.02%, 0.0002% and 0.002%, 0.002% and 2%, 0.002% and 1%, 0.002% and 0.2%, 0.002% and 0.02%, 0.02% and 2%, 0.02% and 1%, 0.02% and 0.2%, 0.2% and 5%, 0.2% and 2%, or 2% and 5%, each inclusive. Generally the concentration of the emulsifier is less than 2% wt % of the composition.

[0039] The lipid composition in the combination typically is provided as an emulsion with an aqueous phase that is water or an isotonic composition. The concentration of the aqueous phase can be any amount, depending upon how much lipid the composition provides. Generally it the aqueous phase, when present constitutes at least 1%, 2%, 5%, 10%, 20%, 30%, 40%, 50% or more of the emulsions, such as between 50% and 98%, 60% and 90%, or 65% and 80%, each inclusive. The emulsion compositions can include tonicity modifiers as discussed above in any suitable amount for adjusting osmolality of the resulting composition, such as, as a weight percentage of the lipid emulsion, between 0.1 to 0.2% and 5%, 0.5% and 4%, or 1% and 3%, each inclusive.

[0040] Tonicity modifiers for all embodiments herein can be selected from among glycerin, sodium chloride, potassium chloride, mannitol, sucrose, lactose, fructose, maltose, dextrose, dextrose anhydrous, xylitol, sorbitol, propylene glycol, polyoxyethylated hydrocarbons, and C₆-C₂₀ saturated or unsaturated aliphatic acids. The lipid emulsions herein for the combination and other embodiments can be formulated for any suitable route of administration, including local, such as peritoneal administration, and systemic administration, such as intravenous, such as an intravenous liquid emulsion (ILE).

[0041] Exemplary of the lipid compositions are those that are a lipid component alone or a lipid component with the emulsifier, or an emulsion. Exemplary of lipid emulsions are those that contain: a biocompatible lipid component in a concentration between 10% and 30%, inclusive, by weight, of the lipid emulsion, wherein the biocompatible lipid component is selected from among soybean oil, safflower oil, olive oil, and mixtures thereof; an egg yolk phospholipid(s) in a concentration that is at or about 1.2% by weight, of the lipid emulsion; glycerin in a concentration between 2.25% and 2.5%, inclusive, by weight, of the lipid emulsion; and water (or an aqueous isotonic solution) in a concentration that is between 60% and 90%, inclusive, by weight, of the lipid emulsion. For example, the liquid emulsion contains: up to 10%, 20% or 30% by weight soybean oil; 1-2%, such as 1.2% by weight egg yolk phospholipid; and 1%-5%, such as 2.5% by weight glycerin.

[0042] The combinations include compositions of any virus, particularly oncolytic viruses. As discussed above, oncolytic include any oncolytic virus, such, but not limited to, a Newcastle Disease virus, parvovirus, vaccinia virus, measles virus, reovirus, vesicular stomatitis virus (VSV), oncolytic adenoviruses, adeno-associated virus, poliovirus, herpes viruses, sindbis virus and seneca valley virus, and derivatives that that are modified to contain heterologous nucleic acid, including heterologous nucleic acid encoding a heterologous gene product.

[0043] Vaccinia viruses and related viruses include strains selected from among Lister, Western Reserve (WR), Copenhagen (Cop), Bern, Paris, Tashkent, Tian Tan, Wyeth (DRYVAX), IHD-J, IHD-W, Brighton, Ankara, CVA382, Modified Vaccinia Ankara (MVA), Dairen I, LC16m8, LC16M0, LIVP, ACAM2000, WR 65-16, Connaught, New York City Board of Health (NYCBH), EM-63 and NYVAC strain. Included are clonal strains of each as well as those containing heterologous nucleic acid.

[0044] Exemplary viruses are Copenhagen and Lister strains, such as LIVP, including clonal strains thereof. Heterologous nucleic acid includes that encoding a therapeutic gene product and/or a reporter gene and/or promoter or regulatory region. Heterologous gene product is selected from among an anticancer agent, an antimetastatic agent, an antiangiogenic agent, an immunomodulatory molecule, an antigen, a cell matrix degradative gene, genes for tissue regeneration and reprogramming human somatic cells to pluripotency, enzymes that modify a substrate to produce a detectable product or signal or are detectable by antibodies, proteins that can bind a contrasting agent, genes for optical imaging or detection, genes for PET imaging and genes for MRI imaging. For example, the heterologous gene product is a therapeutic agent selected from among a hormone, a growth factor, a cytokine, a chemokine, a costimulatory molecule, a ribozyme, a transporter protein, a single chain antibody, such an anti-VEGF or anti-VEGFR, or anti-EGFR antibody, an antisense or ds RNA or other RNA product, a prodrug converting enzyme, an siRNA, a microRNA, a toxin, an antitumor oligopeptide, a mitosis inhibitor protein, an antimitotic oligopeptide, an anti-cancer polypeptide antibiotic, an angiogenesis inhibitor, a tumor suppressor, a cytotoxic protein, a cytostatic protein and a tissue factor.

[0045] The composition containing virus contains any concentration of virus, since dosage can be selected by volume administered or diluted. Concentrations are as discussed above with respect to the compositions above.

[0046] The oncolytic viruses are present in the composition in multidose and single dosage amounts, including, but not limited to between or between about 1×10⁵ and 1×10¹² pfu, 1×10⁶ to 1×10¹⁰ pfu, or 1×10⁷ to 1×10¹⁰ pfu, each inclusive, such as at least or about at least or 1×10⁶, 1×10⁷, 1×10⁸, 1×10⁹, 2×10⁹, 3×10⁹, 4×10⁹, 5×10⁹ pfu, 1×10¹⁰ pfu.

[0047] Another exemplary compositions contains an oncolytic virus in an amount that is between or between about 1×10⁶ to 1×10¹⁰ pfu, inclusive; a biocompatible lipid component as a wt % of the composition of less than 10%; an emulsifier as a wt % of the composition of less than 2%; a tonicity modifier as a wt % of the composition of less than 2%; and an aqueous phase as a wt % of the composition that is greater than 85%. The virus typically is provided as part of the aqueous phase.

[0048] The volume of the composition can be any volume, and can be for single or multiple dosage administration, including, but not limited to, from or from about 0.01 mL to 100 mL, 0.1 mL to 100 mL, 1 mL to 100 mL, 10 mL to 100 mL, 0.01 mL to 10 mL, 0.1 mL to 10 mL, 1 mL to 10 mL, 0.02 mL to 20 mL, 0.05 mL to 5 mL, 0.5 mL to 50 mL, or 0.5 mL to 5 mL, each inclusive.

[0049] The combinations can also include additional compositions, and are additional agents in one or both of the compositions, such as another active agent, such as an anti-cancer compound or therapeutic agent or another different oncolytic virus, and/or a diagnostic agent. Exemplary of such agents are additional active agent is selected from among a therapeutic compound, an agent that increases virus infectivity, a therapeutic or diagnostic virus, an antiviral or chemotherapeutic agent, or an agent or compound for modulation of gene expression of endogenous or heterologous genes encoded by the virus. Therapeutic compounds include those selected from among a cytokine, growth factor, photosensitizing agent, radionuclide, toxin, siRNA molecule, enzyme/pro E drug pair, anti-metabolite, signaling modulator, anti-cancer antibiotic, anti-cancer antibody, angiogenesis inhibitor, chemotherapeutic compound, antimetastatic compound or a combination of any thereof.

[0050] Also provided are combinations of the compositions that contain the virus and lipid as one compositions, and a second compositions containing an additional active agent such as, but not limited to a therapeutic compound, an agent that increases virus infectivity, a therapeutic or diagnostic virus, an antiviral or chemotherapeutic agent, or an agent or compound for modulation of gene expression of endogenous or heterologous genes encoded by the virus. Additional active agents include anti-cancer agents, and also agents that modulate or alter or improve properties of the virus. Therapeutic compound include, for example, any selected from among a cytokine, growth factor, photosensitizing agent, radionuclide, toxin, siRNA molecule, enzyme/pro E drug pair, anti-metabolite, signaling modulator, anti-cancer antibiotic, anti-cancer antibody, angiogenesis inhibitor, chemotherapeutic compound, antimetastatic compound and a combination of any thereof.

[0051] In particular the additional agent for inclusion in the combination and also in any composition provided herein or as part of any combination provided herein, an agent that modulates or alters or improves a property of the virus, such as an agent that increases infectivity of the virus. These include agents that alter the immune response to the virus so that less is cleared upon administration. Additional agents include agents complement inhibitors, such as any agent that inhibits complement activation or the activity of any protein in a complement pathway, such as, inhibition of the activity of any of complement proteins C1, C2, C3, C4, C5, C5a, C5aR, C3aR, Factor B, Factor P, C1q and MBP. For example C5, refers to component 5 (C5) of complement Such agents are known to those of skill in the art, and include, for example, include antibodies specific for one or more of these proteins. Exemplary inhibitors include, for example, cobra venom factor (CVF), heparin, TA 106, TNX-234, anti-properdin, C1-INH, a compstatin or derivative or analog thereof, soluble CR1, K76COOH, eculizumab, pexelizumab, TSA12/22, MSA12/22, ARC 1005, TNX-558, NOX-D19, PMX-53, PMX-201, PMX-205, neutrazumab, and variants, analogs or derivatives thereof that inhibit a complement activity.

[0052] For example, inhibitors include complement C5 inhibitions, such as anti-C5 antibodies. These include any known to those of skill in the art, such as eculizumab, pexelizumab, TSA12/22 or MB12/122, or a variant thereof.

[0053] Provided are combinations containing a virus, particularly an oncolytic virus; and an complement inhibitor, such as an anti-C5 antibody. The virus can be provided as a composition, including as a lipid emulsion as described above. The virus is typically an oncolytic virus, such as any described herein, including, but not limited to, a Newcastle Disease virus, parvovirus, vaccinia virus, measles virus, reovirus, vesicular stomatitis virus (VSV), oncolytic adenoviruses, adeno-associated virus, poliovirus, herpes viruses, sindbis virus and seneca valley virus, derivatives of any of these virus modified to contain nucleic acid encoding a heterologous nucleic acid, such as encoding a gene product.

[0054] Oncolytic viruses, as discussed above, include any oncolytic virus, such, but not limited to, a Newcastle Disease virus, parvovirus, vaccinia virus, measles virus, reovirus, vesicular stomatitis virus (VSV), oncolytic adenoviruses, adeno-associated virus, poliovirus, herpes viruses, sindbis virus and seneca valley virus, and derivatives that that are modified to contain heterologous nucleic acid, including heterologous nucleic acid encoding a heterologous gene product.

[0055] Vaccinia viruses and related viruses include strains selected from among Lister, Western Reserve (WR), Copenhagen (Cop), Bern, Paris, Tashkent, Tian Tan, Wyeth (DRYVAX), IHD-J, IHD-W, Brighton, Ankara, CVA382, Modified Vaccinia Ankara (MVA), Dairen I, LC16m8, LC16M0, LIVP, ACAM2000, WR 65-16, Connaught, New York City Board of Health (NYCBH), EM-63 and NYVAC strain. Included are clonal strains of each as well as those containing heterologous nucleic acid.

[0056] Exemplary viruses are Copenhagen and Lister strains, such as LIVP, including clonal strains thereof. Heterologous nucleic acid includes that encoding a therapeutic gene product and/or a reporter gene and/or promoter or regulatory region. Heterologous gene product is selected from among an anticancer agent, an antimetastatic agent, an antiangiogenic agent, an immunomodulatory molecule, an antigen, a cell matrix degradative gene, genes for tissue regeneration and reprogramming human somatic cells to pluripotency, enzymes that modify a substrate to produce a detectable product or signal or are detectable by antibodies, proteins that can bind a contrasting agent, genes for optical imaging or detection, genes for PET imaging and genes for MRI imaging. For example, the heterologous gene product is a therapeutic agent selected from among a hormone, a growth factor, a cytokine, a chemokine, a costimulatory molecule, a ribozyme, a transporter protein, a single chain antibody, such an anti-VEGF or anti-VEGFR, or anti-EGFR antibody, an antisense or ds RNA or other RNA product, a prodrug converting enzyme, an siRNA, a microRNA, a toxin, an antitumor oligopeptide, a mitosis inhibitor protein, an antimitotic oligopeptide, an anti-cancer polypeptide antibiotic, an angiogenesis inhibitor, a tumor suppressor, a cytotoxic protein, a cytostatic protein and a tissue factor.

The oncolytic viruses are present in the composition in multidose and single dosage amounts, including, but not limited to between or between about 1×10⁵ and 1×10¹² pfu, 1×10⁶ to 1×10¹⁰ pfu, or 1×10⁷ to 1×10¹⁰ pfu, each inclusive, such as at least or about at least or 1×10⁶, 1×10⁷, 1×10⁸, 1×10⁹, 2×10⁹, 3×10⁹, 4×10⁹, 5×10⁹ pfu, 1×10¹⁰ pfu.

[0057] Another exemplary compositions contains an oncolytic virus in an amount that is between or between about 1×10⁶ to 1×10¹⁰ pfu, inclusive; a biocompatible lipid component as a wt % of the composition of less than 10%; an emulsifier as a wt % of the composition of less than 2%; a tonicity modifier as a wt % of the composition of less than 2%; and an aqueous phase as a wt % of the composition that is greater than 85%. The virus typically is provided as part of the aqueous phase.

[0058] The volume of the composition can be any volume, and can be for single or multiple dosage administration, including, but not limited to, from or from about 0.01 mL to 100 mL, 0.1 mL to 100 mL, 1 mL to 100 mL, 10 mL to 100 mL, 0.01 mL to 10 mL, 0.1 mL to 10 mL, 1 mL to 10 mL, 0.02 mL to 20 mL, 0.05 mL to 5 mL, 0.5 mL to 50 mL, or 0.5 mL to 5 mL, each inclusive.

[0059] The infectivity of the virus can be manifested, such as by increased titer or half-life of the oncolytic virus when exposed to a bodily fluid, such as blood or serum. Infectivity can be increased by any amount, including, but not limited to, at least 1.1-fold, 1.2-fold, 1.3-fold, 1.4-fold, 1.5-fold, 1.6-fold, 1.7-fold, 1.8-fold, 1.9-fold, 2.0-fold, 2.5-fold, 3-fold, 4-fold, 5-fold, 6-fold, 7-fold, 8-fold, 9-fold, or 10-fold.

[0060] The compositions can be formulated for direct administration. They can be formulated for local or systemic injection, such as intravenous administration.

[0061] The concentration of anti-C5 antibody is one that selectively or specifically binds to C5, such as eculizumab. It can have an affinity sufficient to inhibit activity of a C5 protein, such affinities generally range from at least 10⁻⁶M, such as having a dissociation constant of less than 10⁻⁶, 10⁻⁷, 10⁻⁸, 10⁻⁹, 10⁻¹⁰, 10⁻¹¹, or 10⁻¹²M. The antibody can be one that specifically or selectively binds the alpha chain of C5. Also included are anti-C5 antibodies that specifically or selectively bind to the beta chain of C5. Anti-C5 antibodies, include any known to those of skill in the art and include, but are not limited to, eculizumab, pexelizumab, TSA12/22 or MB12/122 and variants of any of these antibodies that retain the ability to specifically or selectively bind to C5.

[0062] The amount of the anti-C5 antibody in the compositions and combinations herein is one that increases the infectivity of the virus for pre-treatment or is suitable to administer to a subject to increase infectivity of the virus by any mechanism. Concentrations include, but are not limited to, 1 mg to 5000 mg, 10 mg to 5000 mg, 100 mg to 5000 mg, 100 mg to 2500 mg, 100 mg to 1000 mg, 100 mg to 500 mg, 500 mg to 5000 mg, 500 mg to 2500 mg, 500 mg to 1000 mg, 1000 mg to 2500 mg, 2000 mg to 5000 mg or 1500 mg to 2500 mg, each inclusive, such as at least or about at least or about 100 mg, 200 mg, 300 mg, 400 mg, 500 mg, 600 mg, 700 mg, 800 mg, 900 mg or 1000 mg. The volume of the composition is any suitable or convenient volume.

[0063] The compositions containing the virus can be any suitable volume, and include, but are not limited to, from about 0.01 mL to 100 mL, 0.1 mL to 100 mL, 1 mL to 100 mL, 10 mL to 100 mL, 0.01 mL to 10 mL, 0.1 mL to 10 mL, 1 mL to 10 mL, 0.02 mL to 20 mL, 0.05 mL to 5 mL, 0.5 mL to 50 mL, or 0.5 mL to 5 mL, each inclusive.

[0064] As discussed above, the compositions and combinations, and methods below, increase infectivity of the viruses, and in particular increase infectivity for a target cell compared to in the absence of the anti-C5 antibody. Target cells and tissues include those in vivo in a subject and also in vitro cell lines or is a cell, such as cell therapy compositions, infected ex vivo. Target cells include cells in solid tumors, cells in blood and lymph disorders, circulating tumor cells and metastasizing tumor cells. Infectivity can be manifested by observing increased titer, particularly as a function of time, or half-life of the oncolytic virus when exposed to a body fluid, such as blood and serum. As noted above an increase in infectivity refers to any increase include an increase of at least 1.1-fold, 1.2-fold, 1.3-fold, 1.4-fold, 1.5-fold, 1.6-fold, 1.7-fold, 1.8-fold, 1.9-fold, 2.0-fold, 2.5-fold, 3-fold, 4-fold, 5-fold, 6-fold, 7-fold, 8-fold, 9-fold, or 10-fold.

[0065] It can be manifested by virtue of decreased immune response to the virus and/or a change in properties of the virus, such as, for example, increased binding to a target cell or to blood cells compared to in the absence of the anti-C5 antibody. Increased binding refers to any increase, including at least 1.1-fold, 1.2-fold, 1.3-fold, 1.4-fold, 1.5-fold, 1.6-fold, 1.7-fold, 1.8-fold, 1.9-fold, 2.0-fold, 2.5-fold, 3-fold, 4-fold, 5-fold, 6-fold, 7-fold, 8-fold, 9-fold, 10-fold

[0066] Kits, which comprise the combinations and/or compositions provided herein are provided. The kits optionally include packaging, devices and components for administration of the viruses and lipids compositions and combinations and instructions for use.

[0067] Provided are methods for increasing the infectivity any virus, particularly the oncolytic viruses described herein, are provided. The methods include methods in which a virus, such as an oncolytic virus, is contacted in vitro with a biocompatible lipid component for a sufficient time to produce a lipid-treated virus that exhibits increased infectivity for a target cell compared to the oncolytic virus in the absence of contacting with the biocompatible lipid component.

[0068] Methods of treating diseases in which immunoprivileged cells and tissues, are involved are provided. The immunoprivileged cells and tissues are the cells and tissues, such as tumor cells, circulating tumor cells, and metastasizing cancerous cells, that are the targets of oncolytic therapy. The target cells can be treated in vivo, ex vivo and/or in vitro as described herein.

[0069] Hence, provided are methods for treating a disease or condition in a subject treatable by an oncolytic virus. The compositions, and combinations herein provide for methods in which the infectivity of viruses, particularly oncolytic viruses is enhanced by adjunct therapy. Hence the combination and compositions can be administered to a subject and/or the viruses can be contacted with the lipid containing compositions to produce lipid-treated viruses with enhanced infectivity; such viruses can then be administered to a subject.

[0070] In particular in some embodiments, provided are methods for increasing the infectivity of the viruses that include, for example: a) contacting an oncolytic virus in vitro with a biocompatible lipid component for a sufficient time to produce a lipid-treated virus composition, wherein the lipid-treated virus exhibits increased infectivity for a target cell compared to the oncolytic virus in the absence of contacting with the biocompatible lipid component; and b) administering the lipid-treated virus composition to the subject. Treatment is manifested, for example, by increased titer or half-life of the oncolytic virus when exposed to a bodily fluid, such as blood or serum. Any increase is contemplated, such as, but not limited to at least 1.1-fold, 1.2-fold, 1.3-fold, 1.4-fold, 1.5-fold, 1.6-fold, 1.7-fold, 1.8-fold, 1.9-fold, 2.0-fold, 2.5-fold, 3-fold, 4-fold, 5-fold, 6-fold, 7-fold, 8-fold, 9-fold, or 10-fold. The virus, such as the oncolytic virus, is contacted with a biocompatible lipid component for 5 minutes, 10 minutes, 15 minutes, 20 minutes, 30 minutes, 1 hour, such as at least 30 minutes to 12 hours, 15 hours, 20 hours, 24 hours, 30 minutes to 6 hours, 30 minutes to 4 hours, 30 minutes to 2 hours, 1 hour to 12 hours, 1 hour to 6 hours, 1 hour to 4 hours, 1 hour to 2 hours, 2 hours to 12 hours, 2 hours to 6 hours, 2 hours to 4 hours, 4 hours to 12 hours, 4 hours to 6 hours, or 6 hours to 12 hours. As described for the composition above, contacting can be effected at any temperature at which the virus remains viable, including but not limited to at or between 0° to 42° C., inclusive, such as at or about 20° C. to 40° C., 10° C. to 30° C., 35° C. to 42° C., inclusive. Typically contacting is effected at or about or at least 37° C.

[0071] Lipids for contacting the virus include any known to those of skill in the art that can be administered systemically. These include vegetable oils, such as soybean oil, which contain a mixture of various lipids. The lipid component includes, but is not limited to, fatty acids and fatty acid derivatives, such as triglycerides, diglycerides, monoglycerides, phospholipids, and mixtures thereof. The triglycerides and the triglycerides are long-chain triglycerides (LCTs), medium-chain triglycerides (MCTs) and mixtures thereof. Exemplary long-chain triglycerides are linoleate, oleate, palmitate, linolenate, stearate and mixtures thereof. Medium-chain triglycerides include caprylic acid and capric acid.

[0072] The lipids can be provided as oils, including plant oil, vegetable oil, animal oil, fish oil, mineral oil, chemically synthesized oil and mixtures thereof. Plant and vegetable oils include soybean oil, cottonseed oil, safflower oil, corn oil, coconut oil, sesame oil, peanut oil, olive oil, castor oil and mixtures thereof.

[0073] Generally the lipid is provided as an emulsion that contains the lipid in an aqueous phase, such as water or an isotonic aqueous solution. Exemplary compositions are emulsions that contain: a biocompatible lipid component in an amount between 0.001% and 50%, inclusive, such at least 0.0002%, 0.2%, 2% and 40%-50%, inclusive, by weight, of the lipid emulsion; and optionally an emulsifier in an amount between 0.2% and 5%, inclusive, by weight, of the lipid emulsion; and the remainder an aqueous phase in an amount between 50% and 98%, inclusive, by weight, of the lipid emulsion.

[0074] The lipid emulsions herein for the combination and other embodiments can be formulated for any suitable route of administration, including local, such as peritoneal administration, and systemic administration, such as intravenous, such as an intravenous liquid emulsion (ILE).

[0075] Emulsifiers are biocompatible and can be naturally-occurring emulsifier or synthetic emulsifiers, such as phospholipid derived from an egg or soy source, including, but not limited to, egg yolk phospholipids, hydrogenated egg yolk phospholipids, soybean phospholipids, hydrogenated soybean phospholipids and mixtures thereof. Exemplary of emulsifiers is lecithin. The concentration of the emulsifier as a wt % of the composition is between 0.0002% and 5%, 0.0002% and 2%, 0.0002% and 1%, 0.0002% and 0.2%, 0.0002% and 0.02%, 0.0002% and 0.002%, 0.002% and 2%, 0.002% and 1%, 0.002% and 0.2%, 0.002% and 0.02%, 0.02% and 2%, 0.02% and 1%, 0.02% and 0.2%, 0.2% and 5%, 0.2% and 2%, or 2% and 5%, each inclusive. Generally the concentration of the emulsifier is less than 2% wt % of the composition.

[0076] The aqueous phase typically is water or isotonic aqueous medium and contains the virus, particularly in a multiple dosage or single dosage concentration or amounts.

[0077] Other components in the compositions, including tonicity modifiers, pH adjusters and other such components. For example, the compositions can contain a tonicity modifier, such as glycerin, in an amount between 0.00002%, 00001%, 0001%, 0.2% and 5%, inclusive, by weight of the emulsion, generally less than 2%. Exemplary tonicity modifiers include glycerin, sodium chloride, potassium chloride, mannitol, sucrose, lactose, fructose, maltose, dextrose, dextrose anhydrous, xylitol, sorbitol, propylene glycol, polyoxyethylated hydrocarbons, and C₆-C₂₀ saturated and unsaturated aliphatic acids.

[0078] Tonicity modifiers include, but are not limited to, glycerin, sodium chloride, potassium chloride, mannitol, sucrose, lactose, fructose, maltose, dextrose, dextrose anhydrous, xylitol, sorbitol, propylene glycol, polyoxyethylated hydrocarbons, and C₆-C₂₀ saturated or unsaturated aliphatic acids. Concentrations of the tonicity modifier as a wt % of the composition is between 0.0002% and 5%, 0.0002% and 2%, 0.0002% and 1%, 0.0002% and 0.2%, 0.0002% and 0.02%, 0.0002% and 0.002%, 0.002% and 2%, 0.002% and 1%, 0.002% and 0.2%, 0.002% and 0.02%, 0.02% and 2%, 0.02% and 1%, 0.02% and 0.2%, 0.2% and 5%, 0.2% and 2%, or 2% and 5%, each inclusive.

[0079] The compositions contain an aqueous medium such as isotonic solutions selected from among Ringer's solution, Ringer's lactate solution, phosphate-buffered saline (PBS), TRIS-buffered saline (TBS), Hank's balanced salt solution (HBSS), Earle's balanced salt solution (EBSS), standard saline citrate (SSC), HEPES-buffered saline (HBS), Grey's balanced salt solution (GBSS), and normal saline (NaCl). The concentration of the aqueous phase can be between 40% and 99.9%, 50 and 99%, 60% and 99%, 70% and 99%, 80% and 99%, 90% and 99%, 70% and 95% or 80% and 90%, each inclusive.

[0080] Exemplary of a lipid emulsion is on that contains: a biocompatible lipid component in an amount between 2% and 50%, inclusive, by weight, of the lipid emulsion; an emulsifier in an amount between 0.1% or 0.2% and 5%, inclusive, by weight, of the lipid emulsion; and an aqueous phase in an amount between 50% and 98%, inclusive, by weight, of the lipid emulsion. In one embodiment the lipid emulsion for treatment of the virus contains: the biocompatible lipid component in a concentration between 10% and 30%, inclusive, by weight, of the lipid emulsion, where the biocompatible lipid component is selected from among soybean oil, safflower oil, olive oil, and mixtures thereof; an egg yolk phospholipid(s), such as lecithin, in a concentration that is at or about 1.2% by weight, of the lipid emulsion; glycerin in a concentration between 2.25% and 2.5%, inclusive, by weight, of the lipid emulsion; and water, or an isotonic aqueous medium, in a concentration that is between 60% and 90%, inclusive, by weight, of the lipid emulsion. In particular embodiments, the lipid emulsion contains: at least or at 10%, 20% or 30% by weight soybean oil; 1-2%, such as 1.2% by weight egg yolk phospholipid; and at 2-5% such as 2.5% by weight glycerin.

[0081] In the methods, the viruses include any oncolytic virus, such, but not limited to, a Newcastle Disease virus, parvovirus, vaccinia virus, measles virus, reovirus, vesicular stomatitis virus (VSV), oncolytic adenoviruses, adeno-associated virus, poliovirus, herpes viruses, sindbis virus and seneca valley virus, and derivatives that that are modified to contain heterologous nucleic acid, including heterologous nucleic acid encoding a heterologous gene product.

[0082] Vaccinia viruses and related viruses include strains selected from among Lister, Western Reserve (WR), Copenhagen (Cop), Bern, Paris, Tashkent, Tian Tan, Wyeth (DRYVAX), IHD-J, IHD-W, Brighton, Ankara, CVA382, Modified Vaccinia Ankara (MVA), Dairen I, LC16m8, LC16M0, LIVP, ACAM2000, WR 65-16, Connaught, New York City Board of Health (NYCBH), EM-63 and NYVAC strain. Included are clonal strains of each as well as those containing heterologous nucleic acid, such as nucleic acid encoding a gene product.

[0083] In particular, the viruses include vaccinia viruses, such as LIVP viruses, Copenhagen, Wyeth and others, such as, for example, viruses designated GLV-ONC1 and derivatives thereof and JX-594 and derivatives thereof, and clonal isolates of any vaccinia strain,

[0084] Any of the viruses used in the methods and compositions and combinations herein can be modified, including by insertion of heterologous nucleic acid, as well as deletion of nucleic acid. Inserted nucleic acid includes, for example, nucleic acid encoding a heterologous gene product, such as a therapeutic product or reporter gene product. Exemplary are any selected from among an anticancer agent, an antimetastatic agent, an antiangiogenic agent, an immunomodulatory molecule, an antigen, a cell matrix degradative gene, genes for tissue regeneration and reprogramming human somatic cells to pluripotency, enzymes that modify a substrate to produce a detectable product or signal or are detectable by antibodies, proteins that can bind a contrasting agent, genes for optical imaging or detection, genes for PET imaging and genes for MRI imaging. Other examples include, but are not limited to, a heterologous gene product that is a therapeutic agent selected from among a hormone, a growth factor, a cytokine, a chemokine, a costimulatory molecule, a ribozyme, a transporter protein, a single chain antibody, an antisense RNA, a prodrug converting enzyme, an siRNA, a microRNA, a toxin, an antitumor oligopeptide, a mitosis inhibitor protein, an antimitotic oligopeptide, an anti-cancer polypeptide antibiotic, an angiogenesis inhibitor, a tumor suppressor, a cytotoxic protein, a cytostatic protein and a tissue factor.

[0085] Provided herein are methods of treatment of a disease or condition in a subject treatable by an therapeutic oncolytic virus. Disease and conditions include cancers and proliferative disorders. The disease or condition is a cancer, tumor or metastasis, such as solid tumor. Cancers include, carcinomas, sarcomas, lymphomas and leukemias and other blood disorders, such as cancer of the tongue, mouth, throat, stomach, cecum, colon, rectum, breast, ovary, uterus, thyroid, adrenal cortex, lung, kidney, prostate or pancreas. The subjects include humans and non-human animals, particularly domesticated and farm animals and experimental animals, such as, chimpanzees, gorillas, horse, cat, dog, cow, pig, sheep, goat, mouse, rabbit, chicken, rat, and guinea pig.

[0086] In some embodiments, the methods include administering a composition that contains a lipid-treated therapeutic oncolytic virus. In such compositions, the concentration of virus is any that is suitable for treatment, such, but not limited to, concentrations in which the oncolytic viruses are present in the composition in multidose and single dosage amounts, including, but not limited to between or between about 1×10⁵ and 1×10¹² pfu, 1×10⁶ to 1×10¹⁰ pfu, or 1×10⁷ to 1×10¹⁰ pfu, each inclusive, such as at least or about at least or 1×10⁶, 1×10⁷, 1×10⁸, 1×10⁹, 2×10⁹, 3×10⁹, 4×10⁹, 5×10⁹ pfu, 1×10¹⁰ pfu.

[0087] Another exemplary compositions contains an oncolytic virus in an amount that is between or between about 1×10⁶ to 1×10¹⁰ pfu, inclusive; a biocompatible lipid component as a wt % of the composition of less than 10%; an emulsifier as a wt % of the composition of less than 2%; a tonicity modifier as a wt % of the composition of less than 2%; and an aqueous phase as a wt % of the composition that is greater than 85%. The virus typically is provided as part of the aqueous phase.

[0088] The volume of the composition can be any volume, and can be for single or multiple dosage administration, including, but not limited to, from or from about 0.01 mL to 100 mL, 0.1 mL to 100 mL, 1 mL to 100 mL, 10 mL to 100 mL, 0.01 mL to 10 mL, 0.1 mL to 10 mL, 1 mL to 10 mL, 0.02 mL to 20 mL, 0.05 mL to 5 mL, 0.5 mL to 50 mL, or 0.5 mL to 5 mL, each inclusive.

[0089] Also provided are methods of treating a disease or condition in a subject treatable by an oncolytic virus, comprising administering any of combinations of virus and lipid compositions provided herein, particularly the lipid emulsion compositions. The composition containing the lipid emulsion is administered prior to, simultaneously, intermittently or subsequently from administration of the composition comprising the oncolytic virus. In one embodiment the composition comprising the lipid emulsion is administered prior to administration of the composition comprising the oncolytic virus. Exemplary of such methods are methods in which the lipid emulsion is administered at least 5 minutes, 10 minutes, 20 minutes, 30 minutes, 45 minutes before, such as 5 minutes to 6 hours, 5 minutes to 4 hours, 5 minutes to 2 hours, 5 minutes to 1 hour, 5 minute to 30 minutes, 30 minutes to 6 hours, 30 minutes to 4 hours, 30 minutes to 2 hours, 30 minutes to 1 hour, 1 hour to 6 hours, 1 hour to 4 hours, 1 hour to 2 hours, 2 hours to 6 hours, 2 hours to 4 hours, or 4 hours to 6 hours prior to administration of the composition comprising the oncolytic virus.

[0090] The amount of lipid emulsion is an amount that increases infectivity of the therapeutic oncolytic virus, such as but not limited to, 203 an amount that delivers at least 1 gram (g), 5 g, 10 g, 20 g, 25 g, such as 1 g to 50 g, 1 g to 40 g, 1 g to 30 g, 1 g to 20 g, 1 g to 10 g, 1 g to 5 g, 5 g to 50 g, 5 g to 40 g, 5 g to 30 g, 5 g to 20 g, 5 g to 10 g, 10 g to 50 g, 10 g to 40 g, 10 g to 30 g, 10 g to 20 g, 20 g to 50 g, 20 g to 40 g, or 20 g to 30 g of the biocompatible lipid component. The amount of lipid emulsion composition is sufficient to deliver the desired amount. Such volumes include, at least 1 mL, 2 mL, 3 mL, 5 mL, 10 mL, 50 mL, 100 mL, 150 mL, 200 mL, 300 mL, 400 mL, such as where 1 mL to 500 mL, 1 mL to 200 mL, 1 mL to 100 mL, 1 mL to 50 mL, 50 mL to 500 mL, 50 mL to 200 mL, 50 mL to 100 mL, 100 mL to 500 mL, 100 mL to 200 mL, or 200 mL to 500 mL of lipid emulsion composition is administered. Typically at least 50 mL or 100 mL of lipid emulsion composition is administered.

[0091] In these methods in which viruses and lipid emulsions are administered and in the methods in which the lipid-treated virus is administered, they can be administered with a complement inhibitor. The complement inhibitor can be administered separately or in the same composition as the virus or lipid. Any inhibitor of a complement pathway component is contemplated These include any agent that inhibits complement activation or the activity of any protein in a complement pathway, such as, inhibition of the activity of any of C1, C2, C3, C4, C5, C5a, C5aR, C3aR, Factor B, Factor P, C1q and MBP. Such agents are known to those of skill in the art, and include, for example, include antibodies specific for one or more of these proteins. Exemplary inhibitors include, for example, cobra venom factor (CVF), heparin, TA 106, TNX-234, anti-properdin, C1-INH, a compstatin or derivative or analog thereof, soluble CR1, K76COOH, eculizumab, pexelizumab, TSA12/22, MSA12/22, ARC 1005, TNX-558, NOX-D19, PMX-53, PMX-201, PMX-205, neutrazumab, and variants, analogs or derivatives thereof that inhibit a complement activity. For example, inhibitors include C5 inhibitors, such as anti-C5 antibodies. These include any known to those of skill in the art, such as eculizumab, pexelizumab, TSA12/22 or MB12/122, or a variant thereof. In some embodiments, the complement inhibitor is an anti-C5 antibody, such as, but a not limited to, eculizumab, pexelizumab, TSA12/22 or MB12/122, or a C5-inhibiting variant thereof. In some embodiments, the complement inhibitor is an anti-C5 antibody.

[0092] Also provided are methods in which the combination containing any therapeutic oncolytic virus, including a lipid-treated virus, and a composition containing a complement inhibitor are administered. Treatment is effected by administering the virus and the complement inhibitor, which includes any noted above and herein and. Exemplary of complement inhibitors are anti-C5 antibodies, such as, but not limited to eculizumab, In the methods the composition comprising the complement inhibitor, such as anti-C5 antibody, is administered prior to, simultaneously, intermittently or subsequently from administration of the composition comprising the oncolytic virus.

[0093] The composition comprising the complement inhibitor, such as the anti-C5 antibody, is administered prior to administration of the composition containing the oncolytic virus. It can be administered least 5 minutes, 10 minutes, 20 minutes, 30 minutes, 45 minutes before, such as 5 minutes to 6 hours, 5 minutes to 4 hours, 5 minutes to 2 hours, 5 minutes to 1 hour, 5 minute to 30 minutes, 30 minutes to 6 hours, 30 minutes to 4 hours, 30 minutes to 2 hours, 30 minutes to 1 hour, 1 hour to 6 hours, 1 hour to 4 hours, 1 hour to 2 hours, 2 hours to 6 hours, 2 hours to 4 hours, or 4 hours to 6 hours prior, such as at least 30 minutes to administration of the composition comprising the oncolytic virus.

[0094] The complement inhibitor, such an antibody, depends upon the particular inhibitor and the disease treated and the treatment regimen. Typical amounts include, but are not limited to, administering an amount to deliver 100 mg to 5000 mg, 200 mg to 2000 mg, 500 mg to 1000 mg, 200 mg to 5000 mg, 200 mg to 1000 mg, 500 mg to 5000 mg, 1000 mg to 2000 mg, 1000 mg to 5000 mg or 2000 mg to 5000 mg, such as at least 800 mg, 900 mg, 1000 mg, 1200 mg to 1500 mg.

[0095] The composition containing the virus is administered in an amount that delivers sufficient virus to treat the disease or condition. Such amount depends upon the virus, disease or condition and treatment regimen. Exemplary are administering the composition containing the therapeutic oncolytic virus is administered to deliver at least 1×10⁵ pfu virus, 1×10⁶ pfu virus, 1×10⁷ pfu virus, 1×10⁸ pfu virus, 1×10⁹ pfu virus, 1×10¹⁰ pfu virus, 1×10¹¹ pfu virus, or 1×10¹² pfu virus, such as between 1×10⁵ and 1×10¹² pfu, 1×10⁶ to 1×10¹⁰ pfu, or 1×10⁷ to 1×10¹⁰ pfu, each inclusive, such as at least or about at least or 1×10⁶, 1×10⁷, 1×10⁸, 1×10⁹, 2×10⁹, 3×10⁹, 4×10⁹, 5×10⁹ pfu, or 1×10¹⁰ pfu. In one embodiment the composition comprising the oncolytic virus is administered between 1×10⁸ pfu virus and 1×10¹⁰ pfu virus, inclusive.

[0096] In the methods, the compositions can be administered locally or systemically; for the combinations the compositions can be administered by different routes. In particular embodiments, the composition(s) is(are) administered intravenously or intraperitoneally.

[0097] The compositions and combinations provided here are for use in treating a disease or condition that is one that is treatable by an oncolytic virus. Also provided are uses of the compositions and combinations for treating a disease or condition that is treated by an oncolytic virus. The combinations and uses can be those, wherein, when administered to a subject, the anti-C5 antibody is administered prior to the oncolytic virus.

[0098] Diseases and conditions proliferative disorders, including cancers and inflammatory diseases. The disease or condition can be a tumor or a metastasis. The disease or condition is a cancer, tumor or metastasis, such as solid tumor. Cancers include, carcinomas, sarcomas, lymphomas and leukemias and other blood disorders, such as cancer of the tongue, mouth, throat, stomach, cecum, colon, rectum, breast, ovary, uterus, thyroid, adrenal cortex, lung, kidney, prostate or pancreas. The subjects include humans and non-human animals, particularly domesticated and farm animals and experimental animals, such as, chimpanzees, gorillas, horse, cat, dog, cow, pig, sheep, goat, mouse, rabbit, chicken, rat, and guinea pig.

[0099] Diseases and conditions include proliferative disorders, including cancers as noted above and herein. Cancers include, but are not limited to, a carcinoma, sarcoma, lymphoma and leukemia, such as cancer of the tongue, mouth, throat, stomach, cecum, colon, rectum, breast, ovary, uterus, thyroid, adrenal cortex, lung, kidney, prostate or pancreas.

### DETAILED DESCRIPTION

### Outline

[0100] A. Definition

[0101] B. Oncolytic Virus Therapy
[0102] 1. Oncolytic Viruses
[0103] 2. Virus Therapies to Increase Infectivity

[0104] C. Oncolytic Viruses
[0105] 1. Vaccinia Viruses
   [0106] Lister and LIVP Strains
[0107] 2. Heterologous Nucleic Acid and Modified Viruses
   [0108] a. Exemplary Modifications
   [0109] b. Control of Heterologous Gene Expression
   [0110] c. Exemplary Modified or Recombinant Viruses
   [0111] d. Methods of Generating Modified Viruses
[0112] 3. Methods of Producing Viruses
   [0113] a. Host cells for Propagation
   [0114] b. Concentration Determination
   [0115] c. Storage Methods

[0116] D. Adjunct Therapy with Complement Inhibitors
[0117] 1. The Complement System and Virus Neutralization
   [0118] a. Complement Pathways
      [0119] i. Classical Pathway
      [0120] ii. Alternative Pathway
      [0121] iii. Lectin Pathway
   [0122] b. Complement Effector Mechanisms
      [0123] i. Opsonization
      [0124] ii. Virolysis by the Membrane Attack Complex (MAC)
      [0125] iii. Proinflammatory Mediator Anaphylatoxin
[0126] 2. Exemplary Complement Inhibitors
   [0127] Anti-C5 Antibody

[0128] E. Adjunct Therapy with Lipids and Lipid Emulsions
[0129] 1. Components of Lipid Emulsions
   [0130] a. Lipid Component
   [0131] b. Emulsifiers
   [0132] c. Aqueous Phase
   [0133] d. Additional Ingredients
[0134] 2. Exemplary Injectable Lipid Emulsions (ILE)
   [0135] a. Long-chain triglyceride (LCT) emulsions
   [0136] b. Medium-chain triglyceride (MCT) emulsions
   [0137] c. Fish Oil emulsions
   [0138] d. Mixtures of LCTs, MCTs and fish oils
   [0139] e. Synthetic lipid emulsions

[0140] F. Pharmaceutical Compositions, Formulations and Articles of Manufacture
[0141] 1. Formulation and Dosage Forms
   [0142] a. Oncolytic Virus
   [0143] b. Lipid Emulsion (e.g. Lipid-treated Virus)
   [0144] c. Complement Inhibitor Compositions
[0145] 2. Combinations
[0146] 3. Packaging and Articles of Manufacture

[0147] G. Methods of Assessing Infectivity and Virus Activity
[0148] 1. Viral Infectivity and Anti-Tumorigenecity
[0149] 2. Toxicity/Safety

[0150] H. Therapeutic Methods of Adjunct Therapy
[0151] 1. Hyperproliferative Disease or Disorder
[0152] 2. Dosage and Administration
[0153] 3. Combination Therapy
   [0154] a. Oncolytic or Therapeutic Virus
   [0155] b. Therapeutic Compounds

[0156] I. Examples

[0157] A. DEFINITIONS

[0158] Unless defined otherwise, all technical and scientific terms used herein have the same meaning as is commonly understood by one of skill in the art to which the invention(s) belong. All patents, patent applications, published applications and publications, Genbank sequences, databases, websites and other published materials referred to throughout the entire disclosure herein, unless noted otherwise, are incorporated by reference in their entirety. In the event that there are a plurality of definitions for terms herein, those in this section prevail. Where reference is made to a URL or other such identifier or address, it understood that such identifiers can change and particular information on the internet can come and go, but equivalent information can be found by searching the internet. Reference thereto evidences the availability and public dissemination of such information.

[0159] As used herein, “adjunct therapy” or “adjunctive therapy” refers to a treatment in which another treatment is used with a primary treatment to assist or enhance the primary treatment. Thus, it is a treatment that is given in addition to the primary, main or initial treatment. The adjunct therapy increases the effectiveness of the primary treatment in treating a condition. For purposes herein, treatment with an oncolytic virus is the primary or main treatment, and one or more different treatments are employed to increase the effectiveness of the oncolytic virus therapy, such as by increasing infectivity. For purposes herein, adjunct therapy includes therapy with lipid components (e.g. lipid emulsions) and/or a complement inhibitor (e.g. an anti-C5 antibody), which therapies increases the virus infectivity, and hence therapeutic efficacy, of treatments with an oncolytic virus.

[0160] As used herein, “combination therapy” refers to a treatment in which a subject is given two or more therapeutic agents, such as at least two or at least three therapeutic agents, for treating a single disease. For purposes herein, a combination therapy can include a treatment regime that includes administration of an oncolytic virus and another anti-cancer agent, each for treating the same hyperproliferative disease or conditions, such as the same tumor or cancer.

[0161] As used herein, infectivity with reference to an oncolytic virus refers to the ability of the virus to infect a cell. Virus infectivity is affected by virus titer, half-life, tropism and interaction with a target cell. In particular, the infectivity of a virus is affected by processes that affect virus receptor binding to a target cell, target cell uptake, aggregation, phagocytosis or clearance, or lysis. For example, the infectivity of a virus can be affected by processes that alter a virus from binding to its receptors or being taken up by target cells, by antibody-mediated aggregation of virus particles, by phagocytic clearance mechanisms, or by complement-mediated lysis that disrupts virus cell membranes.

[0162] As used herein, increased virus infectivity refers to processes that result in an increase in the ability of a virus to infect a cell. The increased infectivity can occur due to processes that result in increased binding to target cell receptors or uptake by target cells, decreased virus aggregation, decreased virus clearance, or decreased virus lysis in the presence of the adjunct therapy compared to the absence of the adjunct therapy. Infectivity of a virus can be increased in the presence of an adjunct therapy that effects one or more of the above properties. For purposes herein, infectivity of a virus is increased in the presence of an adjunct therapy, such as a complement inhibitor (e.g. anti-C5 antibody) or lipid emulsion (e.g. 20% soybean oil intravenous fat emulsion, which is marketed under the trademark Intralipid® lipid emulsion), that reduces virus inactivation, such as by reducing virus clearance of lysis. Increased infectivity can be assessed directly or indirectly. For example, infectivity can be assessed by monitoring viral titer (e.g. as assessed by the number of plaques produced in a plaque assay), changes in viral gene expression or host gene expression or cytotoxicity for tumor cells or other target cells. The pharmacokinetic properties of a virus, such as half-life, also can be assessed as a parameter indicative of increased infectivity. Generally, the infectivity of oncolytic virus in the presence of an adjunct therapy provided herein (i.e. lipid emulsion and/or complement inhibitor) is increased at least 1.2-fold, 1.3-fold, 1.4-fold, 1.5-fold, 1.6-fold, 1.7-fold, 1.8-fold, 1.9-fold, 2.0-fold, 2.5-fold, 3-fold, 4-fold, 5-fold, 6-fold, 7-fold, 8-fold, 9-fold, 10-fold or more compared to the absence of the adjunct therapy.

[0163] As used herein, Intralipid® lipid emulsion, refers to the lipid emulsion (10%, 20% or 30% fat emulsion) containing 10%-30% soybean oil, respectively, and also contains 1.2% egg yolk phospholipids, 2.25% glycerin and water for injection, and adjusted to a pH of 6 to 8.9 using sodium hydroxide.

[0164] As used herein, “virus titer” or “viral titer” refers to the concentration of a virus and is a given number of infectious virus units per volume, such as plaque forming units (pfu)/mL. Virus titer can be determined by serial dilution of a sample for infection of target cells in order to quantify the number of infectious or active virus in a sample. For example, virus titer can be determined using a plaque assay.

[0165] As used herein, “virus load” refers to the virus titer in a bodily fluid. For example, the particular viral titer can be dependent on the amount of virus administered, the presence of active virus, and the rate of clearance and/or the half-life of virus in the blood. Hence, the relative degree of virus titer can correlate to the infectivity of the virus. The higher the virus load or titer, generally the greater the infectivity of the virus.

[0166] As used herein, “half-life” with reference to a virus refers to the time taken for half of infectious circulating virus to be cleared from the body.

[0167] As used herein “binding to blood cells” with reference to a virus refers to the association of virus with blood cells. Association can be determined by contacting blood cells with virus for a sufficient time and under conditions to achieve binding, followed by centrifugation and washing of cells to remove loosely bound or unbound virus. For example, binding can be for at least 20 minutes to 6 hours or more, such as generally at least 30 minutes, 1 hour or 2 hours, and at physiologic temperatures (e.g. at or about 37° C.).

[0168] As used herein, “blood cells” refer to cells isolated from whole blood, such as normal human blood, by centrifugation. Such cells include red cells, white cells (i.e. leukocytes and cells of the immune system) and platelets.

[0169] As used herein, a “virus” or virus vector refers to any of a large group of infectious entities that cannot grow or replicate without a host cell. Viruses typically contain a protein coat surrounding an RNA or DNA core of genetic material, but no semipermeable membrane, and are capable of growth and multiplication only in living cells. Viruses include, but are not limited to, poxviruses, herpesviruses, adenoviruses, adeno-associated viruses, lentiviruses, retroviruses, rhabdoviruses, papillomaviruses, vesicular stomatitis virus, measles virus, Newcastle disease virus, picornavirus, Sindbis virus, papillomavirus, parvovirus, reovirus, coxsackievirus, influenza virus, mumps virus, poliovirus, and semliki forest virus.

[0170] As used herein, oncolytic viruses refer to viruses that replicate selectively in tumor cells in tumorous subjects. Some oncolytic viruses can kill a tumor cell following infection of the tumor cell. For example, an oncolytic virus can cause death of the tumor cell by lysing the tumor cell or inducing cell death of the tumor cell.

[0171] As used herein, a therapeutic virus, such as a therapeutic oncolytic virus, is a virus that is used to treat disease or condition. Typically they are not pathogenic or have been rendered non-pathogenic.

[0172] As used herein the term “vaccinia virus” or “VACV” or “VV” denotes a large, complex, enveloped virus belonging to the poxvirus family. It has a linear, double-stranded DNA genome approximately 190 kbp in length, and which encodes approximately 200 proteins. Vaccinia virus strains include, but are not limited to, strains of, derived from, or modified forms of Western Reserve (WR), Copenhagen, Tashkent, Tian Tan, Lister, Wyeth, IHD-J, and IHD-W, Brighton, Ankara, MVA, Dairen I, LIPV, LC16M8, LC16MO, LIVP, WR 65-16, Connaught, New York City Board of Health vaccinia virus strains.

[0173] As used herein, Lister Strain of the Institute of Viral Preparations (LIVP) or LIVP virus strain refers to a virus strain that is the attenuated Lister strain (ATCC Catalog No. VR-1549) that was produced by adaption to calf skin at the Institute of Viral Preparations, Moscow, Russia (Al′tshtein et al. (1985) Dokl. Akad. Nauk USSR 285:696-699). The LIVP strain can be obtained, for example, from the Institute of Viral Preparations, Moscow, Russia (see. e.g., Kutinova et al. (1995) Vaccine 13:487-493); the Microorganism Collection of FSRI SRC VB Vector (Kozlova et al. (2010) Environ. Sci. Technol. 44:5121-5126); or can be obtained from the Moscow Ivanovsky Institute of Virology (C0355 K0602; Agranovski et al. (2006) Atmospheric Environment 40:3924-3929). It also is well known to those of skill in the art; it was the vaccine strain used for vaccination in the USSR and throughout Asia and India. The strain now is used by researchers and is well known (see e.g., Altshteyn et al. (1985) Dokl. Akad. Nauk USSR 285:696-699; Kutinova et al. (1994) Arch. Virol. 134:1-9; Kutinova et al. (1995) Vaccine 13:487-493; Shchelkunov et al. (1993) Virus Research 28:273-283; Sroller et al. (1998) Archives Virology 143:1311-1320; Zinoviev et al., (1994) Gene 147:209-214; and Chkheidze et al. (1993) FEBS 336:340-342). Among the LIVP strains is one that contains a genome having a sequence of nucleotides set forth in SEQ ID NO: 1 or 2, or a sequence that is at least or at least about 97%, 98% or 99% identical to the sequence of nucleotides set forth in SEQ ID NO: 1 or 2. An LIVP virus strain encompasses any virus strain or virus preparation that is obtained by propagation of LIVP through repeat passage in cell lines.

[0174] As used herein, an LIVP clonal strain or LIVP clonal isolate refers to a virus that is derived from the LIVP virus strain by plaque isolation, or other method in which a single clone is propagated, and that has a genome that is homogenous in sequence. Hence, an LIVP clonal strain includes a virus whose genome is present in a virus preparation propagated from LIVP. An LIVP clonal strain does not include a recombinant LIVP virus that is genetically engineered by recombinant means using recombinant DNA methods to introduce heterologous nucleic acid. In particular, an LIVP clonal strain has a genome that does not contain heterologous nucleic acid that contains an open reading frame encoding a heterologous protein. For example, an LIVP clonal strain has a genome that does not contain non-viral heterologous nucleic acid that contains an open reading frame encoding a non-viral heterologous protein. As described herein, however, it is understood that any of the LIVP clonal strains provided herein can be modified in its genome by recombinant means to generate a recombinant virus. For example, an LIVP clonal strain can be modified to generate a recombinant LIVP virus that contains insertion of nucleotides that contain an open reading frame encoding a heterologous protein.

[0175] As used herein, LIVP 1.1.1 is an LIVP clonal strain that has a genome having a sequence of nucleotides set forth in SEQ ID NO: 5, or a genome having a sequence of nucleotides that has at least 97%, 98%, or 99% sequence identity to the sequence of nucleotides set forth in SEQ ID NO: 5.

[0176] As used herein, LIVP 2.1.1 is an LIVP clonal strain that has a genome having a sequence of nucleotides set forth in SEQ ID NO: 6, or a genome having a sequence of nucleotides that has at least 97%, 98%, or 99% sequence identity to the sequence of nucleotides set forth in SEQ ID NO: 6.

[0177] As used herein, LIVP 4.1.1 is an LIVP clonal strain that has a genome having a sequence of nucleotides set forth in SEQ ID NO: 7, or a genome having a sequence of nucleotides that has at least 97%, 98% or 99% sequence identity to the sequence of nucleotides set forth in SEQ ID NO: 7.

[0178] As used herein, LIVP 5.1.1 is an LIVP clonal strain that has a genome having a sequence of nucleotides set forth in SEQ ID NO: 8, or a genome having a sequence of nucleotides that has at least 97%, 98% or 99% sequence identity to the sequence of nucleotides set forth in SEQ ID NO: 8.

[0179] As used herein, LIVP 6.1.1 is an LIVP clonal strain that has a genome having a sequence of nucleotides set forth in SEQ ID NO: 9, or a genome having a sequence of nucleotides that has at least 97%, 98% or 99% sequence identity to the sequence of nucleotides set forth in SEQ ID NO: 9.

[0180] As used herein, LIVP 7.1.1 is an LIVP clonal strain that has a genome having a sequence of nucleotides set forth in SEQ ID NO: 10, or a genome having a sequence of nucleotides that has at least 97%, 98% or 99% sequence identity to the sequence of nucleotides set forth in SEQ ID NO: 10.

[0181] As used herein, LIVP 8.1.1 is an LIVP clonal strain that has a genome having a sequence of nucleotides set forth in SEQ ID NO: 11, or a genome having a sequence of nucleotides that has at least 97%, 98% or 99% sequence identity to the sequence of nucleotides set forth in SEQ ID NO: 11.

[0182] As used herein, LIVP GLV-1h68 (also designated GLV-ONC1) is an LIVP virus that contains ruc-gfp (a luciferase and green fluorescent protein fusion gene (see e.g. U.S. Pat. No. 5,976,796), beta-galactosidase (LacZ) and beta-glucuronidase (gusA) reporter genes inserted into the F14.5L, J2R (thymidine kinase) and A56R (hemagglutinin) loci, respectively. The genome of GLV-1h68 has a sequence of nucleotides set forth in SEQ ID NO: 3 or a sequence of nucleotides that has at least 97%, 98% or 99% sequence identity to the sequence of nucleotides set forth in SEQ ID NO: 3.

[0183] As used herein, the term “modified virus” or “recombinant virus” refers to a virus that is altered compared to a parental strain of the virus. Typically modified viruses have one or more truncations, mutations, insertions or deletions in the genome of virus. A modified virus can have one or more endogenous viral genes modified and/or one or more intergenic regions modified. Exemplary modified viruses can have one or more heterologous nucleic acid sequences inserted into the genome of the virus. Modified viruses can contain one or more heterologous nucleic acid sequences in the form of a gene expression cassette for the expression of a heterologous gene.

[0184] As used herein, a modified LIVP virus strain refers to an LIVP virus that has a genome that is not contained in LIVP, but is a virus that is produced by modification of a genome of a strain derived from LIVP. Typically, the genome of the virus is modified by substitution (replacement), insertion (addition) or deletion (truncation) of nucleotides. Modifications can be made using any method known to one of skill in the art such as genetic engineering and recombinant DNA methods. Hence, a modified virus is a virus that is altered in its genome compared to the genome of a parental virus. Exemplary modified viruses have one or more heterologous nucleic acid sequences inserted into the genome of the virus. Typically, the heterologous nucleic acid contains an open reading frame encoding a heterologous protein. For example, modified viruses herein can contain one or more heterologous nucleic acid sequences in the form of a gene expression cassette for the expression of a heterologous gene.

[0185] As used herein, “production by recombinant methods” or “methods using recombinant DNA methods” or variations thereof refers to the use of the well-known methods of molecular biology for expressing proteins encoded by cloned DNA. As used herein a “gene expression cassette” or “expression cassette” is a nucleic acid construct, containing nucleic acid elements that are capable of effecting expression of a gene in hosts that are compatible with such sequences. Expression cassettes include at least promoters and optionally, transcription termination signals. Typically, the expression cassette includes a nucleic acid to be transcribed operably linked to a promoter. Expression cassettes can contain genes that encode, for example, a therapeutic gene product, or a detectable protein or a selectable marker gene.

[0186] As used herein, a heterologous nucleic acid (also referred to as exogenous nucleic acid or foreign nucleic acid) refers to a nucleic acid that is not normally produced in vivo by an organism or virus from which it is expressed or that is produced by an organism or a virus but is at a different locus, or that mediates or encodes mediators that alter expression of endogenous nucleic acid, such as DNA, by affecting transcription, translation, or other regulatable biochemical processes. Hence, heterologous nucleic acid is often not normally endogenous to a virus into which it is introduced. Heterologous nucleic acid can refer to a nucleic acid molecule from another virus in the same organism or another organism, including the same species or another species. Heterologous nucleic acid, however, can be endogenous, but is nucleic acid that is expressed from a different locus or altered in its expression or sequence (e.g., a plasmid). Thus, heterologous nucleic acid includes a nucleic acid molecule not present in the exact orientation or position as the counterpart nucleic acid molecule, such as DNA, is found in a genome. Generally, although not necessarily, such nucleic acid encodes RNA and proteins that are not normally produced by the virus or in the same way in the virus in which it is expressed. Any nucleic acid, such as DNA, that one of skill in the art recognizes or considers as heterologous, exogenous or foreign to the virus in which the nucleic acid is expressed is herein encompassed by heterologous nucleic acid. Examples of heterologous nucleic acid include, but are not limited to, nucleic acid that encodes exogenous peptides/proteins, including diagnostic and/or therapeutic agents. Proteins that are encoded by heterologous nucleic acid can be expressed within the virus, secreted, or expressed on the surface of the virus in which the heterologous nucleic acid has been introduced.

[0187] As used herein, a heterologous protein or heterologous polypeptide (also referred to as exogenous protein, exogenous polypeptide, foreign protein or foreign polypeptide) refers to a protein that is not normally produced by a virus.

[0188] As used herein, the term, “therapeutic gene product” or “therapeutic polypeptide” or “therapeutic agent” refers to any heterologous protein expressed by the therapeutic virus that ameliorates the symptoms of a disease or disorder or ameliorates the disease or disorder. Therapeutic agents include, but are not limited to, moieties that inhibit cell growth or promote cell death, that can be activated to inhibit cell growth or promote cell death, or that activate another agent to inhibit cell growth or promote cell death. Optionally, the therapeutic agent can exhibit or manifest additional properties, such as, properties that permit its use as an imaging agent, as described elsewhere herein. Exemplary therapeutic agents include, for example, cytokines, growth factors, photosensitizing agents, radionuclides, toxins, anti-metabolites, signaling modulators, anti-cancer antibiotics, anti-cancer antibodies, angiogenesis inhibitors, chemotherapeutic compounds or a combination thereof.

[0189] As used herein, a “reporter gene” is a gene that encodes a reporter molecule that can be detected when expressed by a virus provided herein or encodes a molecule that modulates expression of a detectable molecule, such as nucleic acid molecule or a protein, or modulates an activity or event that is detectable. Hence reporter molecules include, nucleic acid molecules, such as expressed RNA molecules, and proteins.

[0190] As used herein, a detectable label or detectable moiety or diagnostic moiety (also imaging label, imaging agent, or imaging moiety) refers to an atom, molecule or composition, wherein the presence of the atom, molecule or composition can be directly or indirectly measured. Detectable labels can be used to image one or more of any of the viruses provided herein. Detectable labels include, for example, chemiluminescent moieties, bioluminescent moieties, fluorescent moieties, radionuclides, and metals. Methods for detecting labels are well known in the art. Such a label can be detected, for example, by visual inspection, by fluorescence spectroscopy, by reflectance measurement, by flow cytometry, by X-rays, by a variety of magnetic resonance methods such as magnetic resonance imaging (MRI) and magnetic resonance spectroscopy (MRS). Methods of detection also include any of a variety of tomographic methods including computed tomography (CT), computed axial tomography (CAT), electron beam computed tomography (EBCT), high resolution computed tomography (HRCT), hypocycloidal tomography, positron emission tomography (PET), single-photon emission computed tomography (SPECT), spiral computed tomography, and ultrasonic tomography. Direct detection of a detectable label refers to, for example, measurement of a physical phenomenon of the detectable label itself, such as energy or particle emission or absorption of the label itself, such as by X-ray or MRI. Indirect detection refers to measurement of a physical phenomenon of an atom, molecule or composition that binds directly or indirectly to the detectable label, such as energy or particle emission or absorption, of an atom, molecule or composition that binds directly or indirectly to the detectable label. In a non-limiting example of indirect detection, a detectable label can be biotin, which can be detected by binding to avidin. Non-labeled avidin can be administered systemically to block nonspecific binding, followed by systemic administration of labeled avidin. Thus, included within the scope of a detectable label or detectable moiety is a bindable label or bindable moiety, which refers to an atom, molecule or composition, wherein the presence of the atom, molecule or composition can be detected as a result of the label or moiety binding to another atom, molecule or composition. Exemplary detectable labels include, for example, metals such as colloidal gold, iron, gadolinium, and gallium-67, fluorescent moieties, and radionuclides. Exemplary fluorescent moieties and radionuclides are provided elsewhere herein.

[0191] As used herein, operative linkage of heterologous nucleic acids to regulatory and effector sequences of nucleotides, such as promoters, enhancers, transcriptional and translational stop sites, and other signal sequences refers to the relationship between such nucleic acid, such as DNA, and such sequences of nucleotides. For example, operative linkage of heterologous DNA to a promoter refers to the physical relationship between the DNA and the promoter such that the transcription of such DNA is initiated from the promoter by an RNA polymerase that specifically recognizes, binds to and transcribes the DNA. Thus, operatively linked or operationally associated refers to the functional relationship of a nucleic acid, such as DNA, with regulatory and effector sequences of nucleotides, such as promoters, enhancers, transcriptional and translational stop sites, and other signal sequences. For example, operative linkage of DNA to a promoter refers to the physical and functional relationship between the DNA and the promoter such that the transcription of such DNA is initiated from the promoter by an RNA polymerase that specifically recognizes, binds to and transcribes the DNA. In order to optimize expression and/or transcription, it can be necessary to remove, add or alter 5′ untranslated portions of the clones to eliminate extra, potentially inappropriate, alternative translation initiation (i.e., start) codons or other sequences that can interfere with or reduce expression, either at the level of transcription or translation. In addition, consensus ribosome binding sites can be inserted immediately 5′ of the start codon and can enhance expression (see, e.g., Kozak J. Biol. Chem. 266: 19867-19870 (1991) and Shine and Delgarno, Nature 254(5495):34-38 (1975)). The desirability of (or need for) such modification can be empirically determined.

[0192] As used herein, the phrases “operatively positioned,” “operatively linked,” “under control,” and “under transcriptional control” mean that a promoter is in a correct functional location and orientation in relation to a nucleic acid sequence to control transcriptional initiation and expression of that sequence.

[0193] As used herein, an “internal ribosome entry site” (IRES) refers to a nucleotide sequence that allows for translation initiation in the middle of a messenger RNA (mRNA) sequence as part of protein synthesis.

[0194] As used herein, a heterologous promoter refers to a promoter that is not normally found in the wild-type organism or virus or that is at a different locus as compared to a wild-type organism or virus. A heterologous promoter is often not endogenous to a virus into which it is introduced, but has been obtained from another virus or prepared synthetically. A heterologous promoter can refer to a promoter from another virus in the same organism or another organism, including the same species or another species. A heterologous promoter, however, can be endogenous, but is a promoter that is altered in its sequence or occurs at a different locus (e.g., at a different location in the genome or on a plasmid). Thus, a heterologous promoter includes a promoter not present in the exact orientation or position as the counterpart promoter is found in a genome.

[0195] A synthetic promoter is a heterologous promoter that has a nucleotide sequence that is not found in nature. A synthetic promoter can be a nucleic acid molecule that has a synthetic sequence or a sequence derived from a native promoter or portion thereof. A synthetic promoter also can be a hybrid promoter composed of different elements derived from different native promoters.

[0196] As used herein, a virus preparation or virus composition, for example an LIVP virus preparation, refers to a virus composition obtained by propagation of a virus strain, for example an LIVP virus strain, an LIVP clonal strain or a modified or recombinant virus strain, in vivo or in vitro in a culture system. For example, an LIVP virus preparation refers to a viral composition obtained by propagation of a virus strain in host cells, typically upon purification from the culture system using standard methods known in the art. A virus preparation generally is made up of a number of virus particles or virions. If desired, the number of virus particles in the sample or preparation can be determined using a plaque assay to calculate the number of plaque forming units per sample unit volume (pfu/mL), assuming that each plaque formed is representative of one infective virus particle. Each virus particle or virion in a preparation can have the same genomic sequence compared to other virus particles (i.e. the preparation is homogeneous in sequence) or can have different genomic sequences (i.e. the preparation is heterogeneous in sequence). It is understood to those of skill in the art that, in the absence of clonal isolation, heterogeneity or diversity in the genome of a virus can occur as the virus reproduces, such as by homologous recombination events that occur in the natural selection processes of virus strains (Plotkin & Orenstein (eds) “Recombinant Vaccinia Virus Vaccines” in Vaccines, 3^{rd} edition (1999)).

[0197] As used herein, plaque forming unit (pfu) or infectious unit (IU) refers to the number of infectious or live viruses. It thus reflects the amount of active virus in the preparation. The pfu can be determined using a plaque formation assay or an end-point dilution assay, which are standard assays known to one of skill in the art.

[0198] As used herein, a lipid refers to any of a class of organic compounds that are fatty acids or their derivatives and are insoluble in water but soluble in organic solvents. Lipids includes fats, fatty acids, and derivatives of fatty acids, including triglycerides, diglycerides, monoglycerides, and phospholipids. They include many natural oils, waxes, and steroids.

[0199] As used herein, “fatty acid” refers to straight-chain hydrocarbon molecules with a carboxyl (—COOH) group at one end of the chain.

[0200] As used herein, a lipid component refers to a composition or material containing a lipid or lipids. Typically, the lipid component is an oil, such as a plant, vegetable, animal, fish, mineral, or chemically synthesized oil. For example, the lipid component is a triglyceride-containing oil, for example, a soybean oil or safflower oil or mixtures thereof.

[0201] As used herein, a biocompatible lipid or a biocompatible lipid component refers to a lipid or lipid composition that is not harmful to living tissues. Generally, biocompatibility is achieved when the body of a subject accepts the lipid or composition as a normal constituent and the material undergoes normal metabolic degradation. A biocompatible lipid can be a synthetic lipid or a natural or naturally occurring lipid. For example, a biocompatible lipid can include natural oils, such as soybean oil, cotton-seed oil, safflower oil and others described herein or known in the art. Biocompatibility of compositions generally also is achieved by formulation as an isotonic solution having a physiologic pH.

[0202] As used herein, soybean oil refers to a vegetable oil extracted from the seeds of the soyben (Glycine max). Per 100 g, soybean oil has 16 g of saturated fat, 23 g of mono-unsaturated fat, and 58 g of poly-unsaturated fat. The major unsaturated fatty acids in soybean oil triglycerides are the poly-unsaturates, alpha-linolenic acid (C-18:3), 7-10%, and linoleic acid (C-18:2), 51%; and the mono-unsaturate, oleic acid (C-18:1), 23%. It also contains the saturated fatty acids, stearic acid, (C-18:0), 4%, and palmitic acid, (c-16:0), 10%.

[0203] As used herein, an emulsion refers to a colloidal dispersion of two immiscible liquids, for example, an oil and an aqueous liquid, for example, water, one of which is part of a continuous phase and the other of which is part of a dispersed phase. In an oil-in-water emulsion, the dispersed phase is an oil phase and the continuous phase is an aqueous (e.g., water) phase. Emulsions typically are stabilized by one or more emulsifiers (or surfactants). Emulsifiers form an interfacial film between the oil and water phase of the emulsion, providing stability.

[0204] As used herein, “lipid emulsion” or “fat emulsion” refer to an emulsion of a lipid component with an aqueous liquid. The lipid emulsions can contain one or more additional ingredients. Typically, the lipid emulsions provided herein are oil-in-water emulsions that contain a lipid component, an emulsifier, an aqueous phase, and optionally a tonicity modifier.

[0205] As used herein, an “intravenous lipid emulsion” or “injection lipid emulsion,” i.e. ILE, (also termed intravenous fat emulsions or IVFE) refer to emulsions of fats or lipids that contain one or more triglyceride-containing oils, a phospholipid emulsifier, and typically a tonicity modifier (e.g. glycerin) to maintain isotonicity in blood. ILEs typically are used in parenteral feeding, but also are used as a delivery vehicle for drugs that are poorly soluble in water. Commercially available ILEs include any described herein or known in the art. For example, commercially available ILEs include, but are not limited to any made from soybean oil (e.g. Intralipid® lipid emulsion 10%, 20% or 30%; or Liposyn® III lipid emulsion 20%) or combined safflower/soybean oil (e.g. Liposyn® II 10%, containing 5% safflower oil and 5% soybean oil).

[0206] As used herein, “emulsifier” refers to a surface-active agent that stabilizes an emulsion. An emulsifier can include synthetic and naturally occurring amphiphilic molecules that have hydrophobic portion(s) and hydrophilic portion(s). Due to their amphiphilic (amphipathic) nature, emulsifiers typically can reduce the surface tension between two immiscible liquids, for example, the oil and water phases in an emulsion, stabilizing the emulsion. An emulsifier contains phospholipids, and can include surfactants and other natural or synthetic emulsifiers. For example, natural emulsifiers include those made from ingredients derived from nature, such as egg yolks that contain lecithin.

[0207] As used herein, the term “tonicity modifier” is used to mean a compound or compounds that can be used to adjust the tonicity of the lipid emulsion. Suitable tonicity modifiers include glycerin (i.e., glycerol or glycerin), sodium chloride, potassium chloride, mannitol, sucrose, lactose, fructose, maltose, dextrose, dextrose anhydrous, xylitol, sorbitol, propylene glycol, polyoxyethylated hydrocarbons, C₆-C₂₀ saturated or unsaturated aliphatic acids, and other tonicity modifiers known to those of skill in the art.

[0208] As used herein, “natural” or “naturally occurring” is used to refer to a composition, emulsion and/or ingredients in the composition or emulsion that can be found in nature and are not solely man-made. For example, egg yolk phospholipids are naturally occurring emulsifiers. Typically, the lipid emulsions provided herein contain one or more natural ingredients.

[0209] As used herein, “w/w,” “by weight,” “% by weight,” “wt %” and “weight percent” are used synonymously to express the ratio of the mass of one component of a composition compared to the mass of the entire composition. For example, when the amount of a particular ingredient represents 1%, by weight (w/w) of a concentrate, the mass of that ingredient is 1% of the mass of the entire concentrate. Similarly, when the amount of an ingredient is 50% (w/w) of the concentrate, the mass of that ingredient is 50% of the entire mass of the concentrate. Similarly, when a composition and/or a compound contains 10%, by weight of an ingredient, the mass of the ingredient is 10% of the total mass of the composition or compound. When a composition contains 10 wt % of an ingredient, the mass of that ingredient is 10% of the mass of the entire composition. When only a concentration, amount, or percentage (without units) is listed, it is to be understood that the concentration or percentage is a concentration or percentage by weight.

[0210] As used herein, a lipid-treated virus refers to a virus that has been exposed or contacted with a lipid or lipid component sufficient to increase infectivity of the virus. For example, a lipid-treated virus includes a virus composition that is mixed with an emulsion containing a biocompatible lipid component (e.g. soybean oil) or formed as an emulsion with a biocompatible lipid component (e.g. soybean oil). The contacting or exposure can include a pretreatment of a virus composition with a lipid component, such as a biocompatible lipid component, under conditions sufficient to allow lipid portions to interact with the virus. For example, contacting can be at a temperature of 0° to 42° C., such as generally greater than 21° C., for 5 minutes to 12 hours, such as generally 30 minutes to 6 hours, for example, at least or about at least 1 hour, 2 hours, 3 hours, 4 hours or more. Contacting typically is at a physiologic temperature (e.g. at or about 37° C.).

[0211] As used herein, a complement inhibitor refers to any molecule that reduces or eliminates complement activity in a complement pathway by preventing or reducing activation and/or propagation of the complement cascade that results in the formation of the membrane attack complex (MAC) and/or effector molecules. A complement inhibitor can operate on one or more of the complement pathways, i.e., classical, alternative or lectin pathway. The inhibitor can be a molecule that prevents or reduces the activity of one or more of the complement components C1, C2, C3, C4, C5, C6, C7, C8, C9, Factor B, Factor D, properdin, C1r, C1s, C2a, C3a, C3b, C4a, C4b, C5a, C5b, Bb, C3 convertase, C5 convertase, MAC, complement receptor 1 (CR1), CR2, CR3 or CR4. The reduction in complement activity can be incremental (e.g., a 10%, 20%, 30%, 40%, 50%, 60%, 70%, 80%, or 90% reduction in activity) or complete. For example, in some embodiments, a complement inhibitor can inhibit complement activity by at least 10 (e.g., at least 15, 20, 25, 30, 35, 40, 45, 50, 55, 60, 65, 70, 75, 80, 85, 90, or 95 or greater) % in a standard in vitro red blood cell hemolysis assay or an in vitro CH50eq assay. See, e.g., Kabat and Mayer (eds), “Experimental Immunochemistry, 2^{nd} Edition,” 135-240, Springfield, Ill., C C Thomas (1961), pages 135-139, or a conventional variation of that assay such as the chicken erythrocyte hemolysis method as described in, e.g., Hillmen et al. (2004) N Engl J Med 350(6):552.

[0212] The complement inhibitor can be a soluble protein, a binding molecule such as an antibody or active fragment hereof, or a small organic molecule. For example, a complement inhibitor can be a soluble or membrane-bound protein such as, for example, membrane cofactor protein (MCP), decay accelerating factor (DAF/CD55), CD59, mouse complement receptor 1-related gene/protein y (Crry), human complement receptor 1 (CR1) or factor H; an antibody specific for a component of a complement pathway such as, for example, eculizumab (an anti-C5 antibody marketed under the name Soliris®), pexelizumab (the antigen-binding fragment of eculizumab), an anti-factor B antibody (such as the monoclonal antibody 1379 produced by ATCC Deposit No. PTA-6230), an anti-properdin antibody, an anti-factor D antibody, and others described herein or known in the art; or a small molecule or a linear or cyclic peptide such as, for example, compstatin or N-acetylaspartylglutamic acid (NAAGA). Other complement inhibitors are known to a skilled artisan, including any of the exemplary described complement inhibitors herein.

[0213] As used herein, a “C3 inhibitor” is a molecule or substance that prevents or reduces the cleavage of C3 into C3a and C3b.

[0214] As used herein, a “C5 inhibitor” is a molecule or substance that prevents or reduces the cleavage of C5 into C5a or C5b, thereby preventing the formation of the membrane attack complex (MAC, i.e. C5b-9) or generation of the C5a anaphylatoxin.

[0215] As used herein, a “C5a inhibitor” is a molecule or substance that prevents or reduces the activity of C5a.

[0216] As used herein, a “C5aR inhibitor” is a molecule or substance that prevents or reduces the binding of C5a to the C5a receptor.

[0217] As used herein, a “C3aR inhibitor” is a molecule or substance that prevents or reduces binding of C3a to the C3a receptor.

[0218] As used herein, a “factor D inhibitor” is a molecule or substance that prevents or reduces the activity of Factor D.

[0219] As used herein, a “factor B inhibitor” is a molecule or substance that prevents or reduces the activity of factor B.

[0220] As used herein, a “C4 inhibitor” is a molecule or substance that prevents or reduces the cleavage of C4 into C4b and C4a.

[0221] As used herein, a “C1q inhibitor” is a molecule or substance that prevents or reduces C1q binding to antibody-antigen complexes, virions, infected cells, or other molecules to which C1q binds to initiate complement activation.

[0222] As used herein, “binding molecule” refers to any molecule that specifically exhibits binding activity to specifically bind a binding partner, such as a protein or portion thereof. With reference to a binding molecule that is a complement inhibitor, the binding partner is a complement component, and binding inhibits interaction of the complement component with a sequentially interacting molecule in a complement pathway cascade. A binding molecule can be a peptide or polypeptide, such as an antibody.

[0223] As used herein, binding activity refer to characteristics of a molecule, e.g. a polypeptide, relating to whether or not, and how, it binds one or more binding partners. Binding activities include the ability to bind the binding partner(s), the affinity with which it binds to the binding partner (e.g. high affinity), the avidity with which it binds to the binding partner, the strength of the bond with the binding partner and specificity for binding with the binding partner.

[0224] As used herein, “bind,” “bound” and grammatical variations thereof refer to the participation of a molecule in any attractive interaction with another molecule, resulting in a stable association in which the two molecules are in close proximity to one another. Binding includes, but is not limited to, non-covalent bonds, covalent bonds (such as reversible and irreversible covalent bonds), and includes interactions between molecules such as, but not limited to, proteins, nucleic acids, carbohydrates, lipids, and small molecules, such as chemical compounds including drugs. Exemplary of bonds are antibody-antigen interactions and receptor-ligand interactions. When an antibody “binds” a particular antigen, bind refers to the specific recognition of the antigen by the antibody, through cognate antibody-antigen interaction, at antibody combining sites. Binding also can include association of multiple chains of a polypeptide, such as antibody chains which interact through disulfide bonds.

[0225] As used herein, “specifically bind” or “immunospecifically bind” with respect to an antibody or antigen-binding fragment thereof are used interchangeably herein and refer to the ability of the antibody or antigen-binding fragment to form one or more noncovalent bonds with a cognate antigen, by noncovalent interactions between the antibody combining site(s) of the antibody and the antigen. Typically, an antibody that immunospecifically binds (or that specifically binds) to an antigen is one that binds to the antigen with an affinity constant Kₐ of about or 1×10⁷ M⁻¹ or 1×10⁸ M⁻¹ or greater (or a dissociation constant (K_{d}) of 1×10⁻⁷M or 1×10⁻⁸M or less). Affinity constants can be determined by standard kinetic methodology for antibody reactions, for example, immunoassays, surface plasmon resonance (SPR) (Rich and Myszka (2000) Curr. Opin. Biotechnol 11:54; Englebienne (1998) Analyst. 123:1599), isothermal titration calorimetry (ITC) or other kinetic interaction assays known in the art (see, e.g., Paul, ed., Fundamental Immunology, 2nd ed., Raven Press, New York, pages 332-336 (1989); see also U.S. Pat. No. 7,229,619 for a description of exemplary SPR and ITC methods). Instrumentation and methods for real time detection and monitoring of binding rates are known and are commercially available (e.g., BiaCore 2000, Biacore AB, Uppsala, Sweden and GE Healthcare Life Sciences; Malmqvist (2000) Biochem. Soc. Trans. 27:335).

[0226] As used herein, “antibody” refers to immunoglobulins and immunoglobulin fragments, whether natural or partially or wholly synthetically, such as recombinantly, produced, including any fragment thereof containing at least a portion of the variable heavy chain and light region of the immunoglobulin molecule that is sufficient to form an antigen binding site and, when assembled, to specifically bind antigen. Hence, an antibody includes any protein having a binding domain that is homologous or substantially homologous to an immunoglobulin antigen-binding domain (antibody combining site). For example, an antibody refers to an antibody that contains two heavy chains (which can be denoted H and H′) and two light chains (which can be denoted L and L′), where each heavy chain can be a full-length immunoglobulin heavy chain or a portion thereof sufficient to form an antigen binding site (e.g. heavy chains include, but are not limited to, VH chains, VH-CH1 chains and VH-CH1-CH2-CH3 chains), and each light chain can be a full-length light chain or a portion thereof sufficient to form an antigen binding site (e.g. light chains include, but are not limited to, VL chains and VL-CL chains). Each heavy chain (H and H′) pairs with one light chain (L and L′, respectively). Typically, antibodies minimally include all or at least a portion of the variable heavy (VH) chain and/or the variable light (VL) chain. The antibody also can include all or a portion of the constant region.

[0227] For purposes herein, the term antibody includes full-length antibodies and portions thereof including antibody fragments. Antibody fragments, include, but not limited to, Fab fragments, Fab′ fragments, F(ab′)₂ fragments, Fv fragments, disulfide-linked Fvs (dsFv), Fd fragments, Fd′ fragments, single-chain Fvs (scFv), single-chain Fabs (scFab), diabodies, anti-idiotypic (anti-Id) antibodies, or antigen-binding fragments of any of the above. Antibody also includes synthetic antibodies, recombinantly produced antibodies, multispecific antibodies (e.g., bispecific antibodies), human antibodies, non-human antibodies, humanized antibodies, chimeric antibodies, and intrabodies. Antibodies provided herein include members of any immunoglobulin type (e.g., IgG, IgM, IgD, IgE, IgA and IgY), any class (e.g. IgG1, IgG2, IgG3, IgG4, IgA1 and IgA2) or subclass (e.g., IgG2a and IgG2b).

[0228] As used herein, a full-length antibody is an antibody having two full-length heavy chains (e.g. VH-CH1-CH2-CH3 or VH-CH1-CH2-CH3-CH4) and two full-length light chains (VL-CL) and hinge regions, such as human antibodies produced by antibody secreting B cells and antibodies with the same domains that are produced synthetically.

[0229] As used herein, antibody fragment or antibody portion refers to any portion of a full-length antibody that is less than full length but contains at least a portion of the variable region of the antibody sufficient to form an antigen binding site (e.g. one or more CDRs) and thus retains the binding specificity and/or an activity of the full-length antibody; antibody fragments include antibody derivatives produced by enzymatic treatment of full-length antibodies, as well as synthetically, e.g. recombinantly produced derivatives. Examples of antibody fragments include, but are not limited to, Fab, Fab′, F(ab)₂, single-chain Fvs (scFv), Fv, dsFv, diabody, Fd and Fd fragments (see, for example, Methods in Molecular Biology, Vol 207: Recombinant Antibodies for Cancer Therapy Methods and Protocols (2003); Chapter 1; p 3-25, Kipriyanov). The fragment can include multiple chains linked together, such as by disulfide bridges and/or by peptide linkers. An antibody fragment generally contains at least about 50 amino acids and typically at least 200 amino acids.

[0230] As used herein, an Fv antibody fragment is composed of one variable heavy domain (V_{H}) and one variable light (V_{L}) domain linked by noncovalent interactions.

[0231] As used herein, a dsFv refers to an Fv with an engineered intermolecular disulfide bond, which stabilizes the V_{H}-V_{L} pair.

[0232] As used herein, an Fd fragment is a fragment of an antibody containing a variable domain (V_{H}) and one constant region domain (C_{H}1) of an antibody heavy chain.

[0233] As used herein, a Fab fragment is an antibody fragment that results from digestion of a full-length immunoglobulin with papain, or a fragment having the same structure that is produced synthetically, e.g. by recombinant methods. A Fab fragment contains a light chain (containing a V_{L} and C_{L}) and another chain containing a variable domain of a heavy chain (V_{H}) and one constant region domain of the heavy chain (C_{H}1).

[0234] As used herein, a F(ab′)₂ fragment is an antibody fragment that results from digestion of an immunoglobulin with pepsin at pH 4.0-4.5, or a fragment having the same structure that is produced synthetically, e.g. by recombinant methods. The F(ab′)₂ fragment essentially contains two Fab fragments where each heavy chain portion contains an additional few amino acids, including cysteine residues that form disulfide linkages joining the two fragments.

[0235] As used herein, a Fab′ fragment is a fragment containing one half (one heavy chain and one light chain) of the F(ab′)₂ fragment.

[0236] As used herein, an Fd′ fragment is a fragment of an antibody containing one heavy chain portion of a F(ab′)₂ fragment.

[0237] As used herein, an Fv′ fragment is a fragment containing only the V_{H} and V_{L} domains of an antibody molecule.

[0238] As used herein, hsFv refers to antibody fragments in which the constant domains normally present in a Fab fragment have been substituted with a heterodimeric coiled-coil domain (see, e.g., Arndt et al. (2001) J Mol Biol. 7:312:221-228).

[0239] As used herein, an scFv fragment refers to an antibody fragment that contains a variable light chain (V_{L}) and variable heavy chain (V_{H}), covalently connected by a polypeptide linker in any order. The linker is of a length such that the two variable domains are bridged without substantial interference. Exemplary linkers are (Gly-Ser)ₙ residues with some Glu or Lys residues dispersed throughout to increase solubility.

[0240] As used herein, diabodies are dimeric scFv; diabodies typically have shorter peptide linkers than scFvs, and preferentially dimerize.

[0241] As used herein, a minibody is an engineered antibody construct containing the variable heavy (VH) and variable light (VL) chain domains of a native antibody fused to the hinge region and to the CH3 domain of the immunoglobulin molecule. Minibodies are thus small versions of whole antibodies encoded in a single protein chain which retain the antigen binding region, the CH3 domain to permit assembly into a bivalent molecule and the antibody hinge to accommodate dimerization by disulfide linkages

[0242] As used herein, anti-C5 antibody refers to an antibody or antigen-binding fragment thereof that specifically binds to the complement component C5. Anti-C5 antibodies or antigen-binding fragments thereof include those that bind to the C5 alpha chain or C5 beta chain. Exemplary anti-C5 antibodies include antibodies that bind to a C5 epitope set forth in SEQ ID NO:48 or SEQ ID NO:49.

[0243] As used herein, eculizumab refers to an anti-C5 antibody that is humanized IgG2/4 kappa antibody, made up of two 448 amino acid heavy chains and two 214 amino acid light chains. The heavy chains are composed of human IgG2 sequences in constant region 1, the hinge and the adjacent portion of constant region 2, and human IgG4 sequences in the remaining part of constant region 2 and 3. The light chain is composed of human kappa sequences. The sequence of amino acids of the heavy chain of eculizumab is set forth in SEQ ID NO:44 and the sequence of amino acids of the light chain is set forth in SEQ ID NO:45. Eculizumab specifically binds to an epitope in C5 set forth in SEQ ID NO:48.

[0244] As used herein, an antigen-binding fragment of eculizumab refers to and antibody derived from eculizumab but that is less than the full length of eculizumab but contains at least a portion of the variable region of the antibody sufficient to form an antigen binding site (e.g. one or more CDRs) and thus retains the binding specificity and/or activity of eculizumab. For example, an antigen-binding fragment of eculizumab contains one or more of the CDRs set forth in any of SEQ ID NOS:36-41. Typically, an antigen-binding fragment of eculizumab recognizes the same epitope on C5 as eculizumab, such as the epitope set forth in SEQ ID NO:48. Exemplary of antigen-binding fragments of eculizumab include antibodies that contain the sequence of amino acids set forth in SEQ ID NO:42 (variable heavy chain) and the sequence of amino acids set forth in SEQ ID NO:43 (variable light chain), or a portion of SEQ ID NO:42 and SEQ ID NO:43 sufficient to bind to C5. For example, exemplary of an antigen-binding fragment of eculizumab is an scFv antigen-binding fragment designated pexelizumab or a variant thereof, such as set forth in SEQ ID NO: 46 or SEQ ID NO:47.

[0245] As used herein, a variant or mutant with reference to a complement inhibitor refers to a modified form of the inhibitor that contains one or more amino acid modifications compared to a reference complement inhibitor. Typically, a variant or mutant retains an activity of the reference inhibitor, but the activity can be increased or decreased. Typically, a variant or mutant exhibits 50% to 500% of the activity of the reference inhibitor, such as generally at least 80%, 90%, 100%, 110%, 120%, 130%, 140%, 150%, 200% or more of the activity of the reference inhibitor.

[0246] As used herein, modification is in reference to modification of a sequence of amino acids of a polypeptide or a sequence of nucleotides in a nucleic acid molecule and includes deletions, insertions, and replacements (e.g. substitutions) of amino acids and nucleotides, respectively. Exemplary of modifications are amino acid substitutions. An amino-acid substituted polypeptide can exhibit 65%, 70%, 80%, 85%, 90%, 91%, 92%, 93%, 94%, 95%, 96%, 97%, 98% or more sequence identity to a polypeptide not containing the amino acid substitutions. Amino acid substitutions can be conservative or non-conservative. Generally, any modification to a polypeptide retains an activity of the polypeptide. Methods of modifying a polypeptide are routine to those of skill in the art, such as by using recombinant DNA methodologies.

[0247] As used herein, a variant of eculizumab refers to an antibody derived from eculizumab or an antigen-binding fragment thereof that exhibits one or more modifications in eculizumab and that specifically binds C5, such as specifically bind to the epitope set forth in SEQ ID NO:48. Exemplary variants of eculizumab include those that have a sequence of amino acids for a variable heavy chain that exhibit at least 75%, 80%, 85%, 90%, 91%, 92%, 93%, 94%, 95%, 96%, 97%, 98%, 99% or more sequence identity to the sequence of amino acids set forth in SEQ ID NO:44 and/or a sequence of amino acids for a variable light chain that exhibits at least 75%, 80%, 85%, 90%, 91%, 92%, 93%, 94%, 95%, 96%, 97%, 98%, 99% or more sequence identity to the sequence of amino acids set forth in SEQ ID NO:45, and that specifically bind to C5. Variants also include variants that have a sequence of amino acids for a variable heavy chain that exhibit at least 75%, 80%, 85%, 90%, 91%, 92%, 93%, 94%, 95%, 96%, 97%, 98%, 99% or more sequence identity to the sequence of amino acids set forth in SEQ ID NO:46 or 47.

[0248] As used herein, a derivative with reference to a complement inhibitor refers to a form of the inhibitor that has undergone change or modification from a reference drug or agent, but still retains activity (e.g. exhibits increased or decreased activity) compared to the reference drug or agent. Typically a derivative form of a compound means that a side chain of the compound has been modified or changed.

[0249] As used herein, an analogue or analog with reference to a complement inhibitor is a form of the inhibitor that is related to a reference drug, but whose chemical and biological activities can be different. Typically, analogues exhibit similar activities to a reference drug or agent, but the activity can be increased or decreased or otherwise improved. Typically, an analogue form of a compound or drug means that the backbone core of the structure is modified or changed compared to a reference drug. An analog can be a variant or mutant of a complement inhibitor.

[0250] As used herein, nucleic acids include DNA, RNA and analogs thereof, including peptide nucleic acids (PNA) and mixtures thereof. Nucleic acids can be single or double-stranded. Nucleic acids can encode gene products, such as, for example, polypeptides, regulatory RNAs, microRNAs, siRNAs and functional RNAs.

[0251] As used herein, a peptide refers to a polypeptide that is greater than or equal to 2 amino acids in length, and less than or equal to 40 amino acids in length.

[0252] As used herein, the amino acids which occur in the various sequences of amino acids provided herein are identified according to their known, three-letter or one-letter abbreviations (Table 1). The nucleotides which occur in the various nucleic acid fragments are designated with the standard single-letter designations used routinely in the art.

[0253] As used herein, an “amino acid” is an organic compound containing an amino group and a carboxylic acid group. A polypeptide contains two or more amino acids. For purposes herein, amino acids include the twenty naturally-occurring amino acids, non-natural amino acids and amino acid analogs (i.e., amino acids wherein the α-carbon has a side chain).

[0254] As used herein, “amino acid residue” refers to an amino acid formed upon chemical digestion (hydrolysis) of a polypeptide at its peptide linkages. The amino acid residues described herein are presumed to be in the “L” isomeric form. Residues in the “D” isomeric form, which are so designated, can be substituted for any L-amino acid residue as long as the desired functional property is retained by the polypeptide. NH₂ refers to the free amino group present at the amino terminus of a polypeptide. COOH refers to the free carboxy group present at the carboxyl terminus of a polypeptide. In keeping with standard polypeptide nomenclature described in J. Biol. Chem. 243:3557-3559 (1968), and adopted 37 C.F.R. §§1.821-1.822, abbreviations for amino acid residues are shown in Table 1:

TABLE 1
Table of Correspondence

SYMBOL

| 1-Letter | 3-Letter | AMINO ACID |
|---|---|---|
| Y | Tyr | Tyrosine |
| G | Gly | Glycine |
| F | Phe | Phenylalanine |
| M | Met | Methionine |
| A | Ala | Alanine |
| S | Ser | Serine |
| I | Ile | Isoleucine |
| L | Leu | Leucine |
| T | Thr | Threonine |
| V | Val | Valine |
| P | Pro | Proline |
| K | Lys | Lysine |
| H | His | Histidine |
| Q | Gln | Glutamine |
| E | Glu | Glutamic acid |
| Z | Glx | Glu and/or Gln |
| W | Trp | Tryptophan |
| R | Arg | Arginine |
| D | Asp | Aspartic acid |
| N | Asn | Asparagine |
| B | Asx | Asn and/or Asp |
| C | Cys | Cysteine |
| X | Xaa | Unknown or other |

[0255] All amino acid residue sequences represented herein by formulae have a left to right orientation in the conventional direction of amino-terminus to carboxyl-terminus. In addition, the phrase “amino acid residue” is defined to include the amino acids listed in the Table of Correspondence (Table 1) and modified and unusual amino acids, such as those referred to in 37 C.F.R. §§1.821-1.822, and incorporated herein by reference. Furthermore, it should be noted that a dash at the beginning or end of an amino acid residue sequence indicates a peptide bond to a further sequence of one or more amino acid residues, to an amino-terminal group such as NH₂ or to a carboxyl-terminal group such as COOH.

[0256] As used herein, the “naturally occurring α-amino acids” are the residues of those 20 α-amino acids found in nature which are incorporated into protein by the specific recognition of the charged tRNA molecule with its cognate mRNA codon in humans. Non-naturally occurring amino acids thus include, for example, amino acids or analogs of amino acids other than the 20 naturally-occurring amino acids and include, but are not limited to, the D-stereoisomer of amino acids. Exemplary non-natural amino acids are described herein and are known to those of skill in the art.

[0257] As used herein, suitable conservative substitutions of amino acids are known to those of skill in this art and can be made generally without altering the biological activity of the resulting molecule. Those of skill in this art recognize that, in general, single amino acid substitutions in non-essential regions of a polypeptide do not substantially alter biological activity (see, e.g., Watson et al. Molecular Biology of the Gene, 4th Edition, 1987, The Benjamin/Cummings Pub. co., p. 224). Such substitutions can be made in accordance with those set forth in TABLE 2 as follows:

TABLE 2

| Original residue | Exemplary conservative substitution |
|---|---|
| Ala (A) | Gly; Ser |
| Arg (R) | Lys |
| Asn (N) | Gln; His |
| Cys (C) | Ser |
| Gln (Q) | Asn |
| Glu (E) | Asp |
| Gly (G) | Ala; Pro |
| His (H) | Asn; Gln |
| Ile (I) | Leu; Val |
| Leu (L) | Ile; Val |
| Lys (K) | Arg; Gln; Glu |
| Met (M) | Leu; Tyr; Ile |
| Phe (F) | Met; Leu; Tyr |
| Ser (S) | Thr |
| Thr (T) | Ser |
| Trp (W) | Tyr |
| Tyr (Y) | Trp; Phe |
| Val (V) | Ile; Leu |

Other substitutions also are contemplated, and they can be determined empirically or in accord with known conservative substitutions.

[0258] As used herein, a DNA construct is a single- or double-stranded, linear or circular DNA molecule that contains segments of DNA combined and juxtaposed in a manner not found in nature. DNA constructs exist as a result of human manipulation, and include clones and other copies of manipulated molecules.

[0259] As used herein, a DNA segment is a portion of a larger DNA molecule having specified attributes. For example, a DNA segment encoding a specified polypeptide is a portion of a longer DNA molecule, such as a plasmid or plasmid fragment, which, when read from the 5′ to 3′ direction, encodes the sequence of amino acids of the specified polypeptide.

[0260] As used herein, the term polynucleotide means a single- or double-stranded polymer of deoxyribonucleotides or ribonucleotide bases read from the 5′ to the 3′ end. Polynucleotides include RNA and DNA, and can be isolated from natural sources, synthesized in vitro, or prepared from a combination of natural and synthetic molecules. The length of a polynucleotide molecule is given herein in terms of nucleotides (abbreviated “nt”) or base pairs (abbreviated “bp”). The term nucleotides is used for single- and double-stranded molecules where the context permits. When the term is applied to double-stranded molecules it is used to denote overall length and will be understood to be equivalent to the term base pairs. It will be recognized by those skilled in the art that the two strands of a double-stranded polynucleotide can differ slightly in length and that the ends thereof can be staggered; thus all nucleotides within a double-stranded polynucleotide molecule may not be paired. Such unpaired ends will, in general, not exceed 20 nucleotides in length.

[0261] As used herein, recitation that nucleotides or amino acids “correspond to” nucleotides or amino acids in a disclosed sequence, such as set forth in the Sequence listing, refers to nucleotides or amino acids identified upon alignment with the disclosed sequence to maximize identity using a standard alignment algorithm, such as the GAP algorithm. By aligning the sequences, one skilled in the art can identify corresponding residues, for example, using conserved and identical amino acid residues as guides. In general, to identify corresponding positions, the sequences of amino acids are aligned so that the highest order match is obtained (see, e.g.: Computational Molecular Biology, Lesk, A. M., ed., Oxford University Press, New York, 1988; Biocomputing: Informatics and Genome Projects, Smith, D. W., ed., Academic Press, New York, 1993; Computer Analysis of Sequence Data, Part I, Griffin, A. M., and Griffin, H. G., eds., Humana Press, New Jersey, 1994; Sequence Analysis in Molecular Biology, von Heinje, G., Academic Press, 1987; and Sequence Analysis Primer, Gribskov, M. and Devereux, J., eds., M Stockton Press, New York, 1991; Carrillo et al. (1988) SIAM J Applied Math 48:1073).

[0262] As used herein, “sequence identity” refers to the number of identical or similar amino acids or nucleotide bases in a comparison between a test and a reference polypeptide or polynucleotide. Sequence identity can be determined by sequence alignment of nucleic acid or protein sequences to identify regions of similarity or identity. For purposes herein, sequence identity is generally determined by alignment to identify identical residues. The alignment can be local or global. Matches, mismatches and gaps can be identified between compared sequences. Gaps are null amino acids or nucleotides inserted between the residues of aligned sequences so that identical or similar characters are aligned. Generally, there can be internal and terminal gaps. Sequence identity can be determined by taking into account gaps as the number of identical residues/length of the shortest sequence×100. When using gap penalties, sequence identity can be determined with no penalty for end gaps (e.g. terminal gaps are not penalized). Alternatively, sequence identity can be determined without taking into account gaps as the number of identical positions/length of the total aligned sequence×100. Typically, with reference to sequence identity of virus strains, sequence identity of nucleotide sequences containing nucleotides corresponding to the inverted terminal repetitions (ITRs) is determined using global alignment, whereby terminal gaps are not penalized.

[0263] As used herein, a “global alignment” is an alignment that aligns two sequences from beginning to end, aligning each letter in each sequence only once. An alignment is produced, regardless of whether or not there is similarity or identity between the sequences. For example, 50% sequence identity based on “global alignment” means that in an alignment of the full sequence of two compared sequences each of 100 nucleotides in length, 50% of the residues are the same. It is understood that global alignment also can be used in determining sequence identity even when the length of the aligned sequences is not the same. The differences in the terminal ends of the sequences will be taken into account in determining sequence identity, unless the “no penalty for end gaps” is selected. Generally, a global alignment is used on sequences that share significant similarity over most of their length. Exemplary algorithms for performing global alignment include the Needleman-Wunsch algorithm (Needleman et al. J. Mol. Biol. 48: 443 (1970). Exemplary programs for performing global alignment are publicly available and include the Global Sequence Alignment Tool available at the National Center for Biotechnology Information (NCBI) website (ncbi.nlm.nih.gov/), and the program available at deepc2.psi.iastate.edu/aat/align/align.html.

[0264] As used herein, a “local alignment” is an alignment that aligns two sequences, but only aligns those portions of the sequences that share similarity or identity. Hence, a local alignment determines if sub-segments of one sequence are present in another sequence. If there is no similarity, no alignment will be returned. Local alignment algorithms include BLAST or Smith-Waterman algorithm (Adv. Appl. Math. 2: 482 (1981)). For example, 50% sequence identity based on “local alignment” means that in an alignment of the full sequence of two compared sequences of any length, a region of similarity or identity of 100 nucleotides in length has 50% of the residues that are the same in the region of similarity or identity.

[0265] For purposes herein, sequence identity can be determined by standard alignment algorithm programs used with default gap penalties established by each supplier. Default parameters for the GAP program can include: (1) a unary comparison matrix (containing a value of 1 for identities and 0 for non identities) and the weighted comparison matrix of Gribskov et al. Nucl. Acids Res. 14: 6745 (1986), as described by Schwartz and Dayhoff, eds., Atlas of Protein Sequence and Structure, National Biomedical Research Foundation, pp. 353-358 (1979); (2) a penalty of 3.0 for each gap and an additional 0.10 penalty for each symbol in each gap; and (3) no penalty for end gaps. Whether any two nucleic acid molecules have nucleotide sequences (or any two polypeptides have amino acid sequences) that are at least 80%, 85%, 90%, 95%, 96%, 97%, 98% or 99% “identical,” or other similar variations reciting a percent identity, can be determined using known computer algorithms based on local or global alignment (see e.g. wikipedia.org/wiki/Sequence_alignment_software, providing links to dozens of known and publicly available alignment databases and programs). Generally, for purposes herein sequence identity is determined using computer algorithms based on global alignment, such as the Needleman-Wunsch Global Sequence Alignment tool available from NCBI/BLAST (blast.ncbi.nlm.nih.gov/Blast.cgi?CMD=Web&Page_TYPE=BlastHome); LAlign (William Pearson implementing the Huang and Miller algorithm (Adv. Appl. Math. (1991) 12:337-357)); and program from Xiaoqui Huang available at deepc2.psi.iastate.edu/aat/align/align.html. Generally, when comparing nucleotide sequences herein, an alignment with no penalty for end gaps (e.g. terminal gaps are not penalized) is used.

[0266] Therefore, as used herein, the term “identity” represents a comparison or alignment between a test and a reference polypeptide or polynucleotide. In one non-limiting example, “at least 90% identical to” refers to percent identities from 90 to 100% relative to the reference polypeptide or polynucleotide. Identity at a level of 90% or more is indicative of the fact that, assuming for exemplification purposes a test and reference polypeptide or polynucleotide length of 100 amino acids or nucleotides are compared, no more than 10% (i.e., 10 out of 100) of amino acids or nucleotides in the test polypeptide or polynucleotide differs from that of the reference polypeptides. Similar comparisons can be made between a test and reference polynucleotides. Such differences can be represented as point mutations randomly distributed over the entire length of an amino acid sequence or they can be clustered in one or more locations of varying length up to the maximum allowable, e.g., 10/100 amino acid difference (approximately 90% identity). Differences are defined as nucleic acid or amino acid substitutions, insertions or deletions. Depending on the length of the compared sequences, at the level of homologies or identities above about 85-90%, the result can be independent of the program and gap parameters set; such high levels of identity can be assessed readily, often without relying on software.

[0267] As used herein, substantially pure means sufficiently homogeneous to appear free of readily detectable impurities as determined by standard methods of analysis, such as thin layer chromatography (TLC), gel electrophoresis and high performance liquid chromatography (HPLC), used by those of skill in the art to assess such purity, or sufficiently pure such that further purification would not detectably alter the physical and chemical properties, such as enzymatic and biological activities, of the substance. Methods for purification of the compounds to produce substantially chemically pure compounds are known to those of skill in the art. A substantially chemically pure compound can, however, be a mixture of stereoisomers or isomers. In such instances, further purification might increase the specific activity of the compound.

[0268] As used herein, the term assessing, determining or measuring, used interchangeably herein, is intended to include quantitative and qualitative determination in the sense of obtaining an absolute value for the activity, expression or presence of a product, and also of obtaining an index, ratio, percentage, visual or other value indicative of the level of the activity, expression or presence. Assessment can be direct or indirect.

[0269] As used herein, activity refers to the in vitro or in vivo activities of a compound or virus provided herein. For example, in vivo activities refer to physiological responses that result following in vivo administration thereof (or of a composition or other mixture). Activity, thus, encompasses resulting therapeutic effects and pharmaceutical activity of such compounds, compositions and mixtures. Activities can be observed in in vitro and/or in vivo systems designed to test or use such activities.

[0270] As used herein, “anti-tumor activity” or “anti-tumorigenic” refers to virus strains that prevent or inhibit the formation or growth of tumors in vitro or in vivo in a subject. Anti-tumor activity can be determined by assessing a parameter or parameters indicative of anti-tumor activity. These include, but are not limited to, infectivity of tumor cells, accumulation of virus in tumor tissues, viral nucleic acid replication in tumor cells, virus production in tumor cells, viral gene expression in tumor cells, cytotoxicity of tumor cells, tumor cell selectivity, tumor cell type selectivity, decreased tumor size, increased tumor volume, decreased tumor weight, and initiation of specific and nonspecific anti-tumor immune responses. Assays that assess any of the above parameters or other anti-tumorigenic properties are known to one of skill in the art. Exemplary assays are described herein. Hence, a virus that exhibits any one or more of the above activities or properties exhibits anti-tumor activity.

[0271] As used herein, “toxicity” (also referred to as virulence or pathogenicity herein) with reference to a virus refers to the deleterious or toxic effects to a host upon administration of the virus. For an oncolytic virus, such as LIVP, the toxicity of a virus is associated with its accumulation in non-tumorous organs or tissues, which can impact the survival of the host or result in deleterious or toxic effects. Toxicity can be measured by assessing one or more parameters indicative of toxicity, which include, but are not limited to, decreased survival of the subject, decreased body weight, fever, rash, allergy, fatigue, abdominal pain, induction of an immune response in the subject and pock formation. Assays or measures that assess any of the above parameters or other toxic properties known to one of skill in the art are described herein or are known to one of skill in the art. Hence, a virus that mediates any one or more of the above activities or properties in a host exhibits some degree of toxicity.

[0272] As used herein, a tumor cell or cancer cell refers to cells that divides and reproduces abnormally because growth and division is not regulated or controlled, i.e. cells that are susceptible to uncontrolled growth. A tumor cell can be a benign or malignant cell. Typically, the tumor cell is a malignant cell that can spread to other parts of the body, a process known as metastasis.

[0273] As used herein, the terms immunoprivileged cells and immunoprivileged tissues refer to cells and tissues, such as solid tumors, which are sequestered from the immune system. Generally, administration of a virus to a subject elicits an immune response that clears the virus from the subject. Immunoprivileged sites, however, are shielded or sequestered from the immune response, permitting the virus to survive and generally to replicate Immunoprivileged tissues include proliferating tissues, such as tumor tissues and other tissues and cells involved in other proliferative disorders, wounds and other tissues involved in inflammatory responses.

[0274] As used herein, a disease or disorder refers to a pathological condition in an organism resulting from, for example, infection or genetic defect, and characterized by identifiable symptoms. An exemplary disease as described herein is a neoplastic disease, such as cancer.

[0275] As used herein, proliferative disorder or condition or hyperproliferative disorder or condition includes any disorders involving abnormal proliferation of cells. Such disorders include, but are not limited to, neoplastic diseases, inflammatory responses and disorders, e.g. including wounds or lesions involving wound healing processes, psoriasis, restenosis, macular degeneration, diabetic retinopathies, endometriosis, benign prostatic hypertrophy, hypertrophic scarring, cirrhosis, proliferative vitreoretinopathy, retinopathy of prematurity, and immunoproliferative diseases or disorders, e.g. inflammatory bowel disease, rheumatoid arthritis, systemic lupus erythematosus (SLE) and vascular hyperproliferation secondary to retinal hypoxia or vasculitis.

[0276] As used herein, a wound or lesion refers to any damage to any tissue in a living organism. The tissue can be an internal tissue, such as the stomach lining or a bone, or an external tissue, such as the skin. As such, a wound or lesion can include, but is not limited to, a gastrointestinal tract ulcer, a broken bone, a neoplasia, and cut or abraded skin. A wound or lesion can be in a soft tissue, such as the spleen, or in a hard tissue, such as bone. The wound or lesion can have been caused by any agent, including traumatic injury, infection or surgical intervention.

[0277] As used herein, a tumor, also known as a neoplasm, is an abnormal mass of tissue that results when cells proliferate at an abnormally high rate. Tumors can show partial or total lack of structural organization and functional coordination with normal tissue. Tumors can be benign (not cancerous), or malignant (cancerous). As used herein, a tumor is intended to encompass hematopoietic tumors as well as solid tumors.

[0278] Malignant tumors can be broadly classified into three major types. Carcinomas are malignant tumors arising from epithelial structures (e.g. breast, prostate, lung, colon, pancreas). Sarcomas are malignant tumors that originate from connective tissues, or mesenchymal cells, such as muscle, cartilage, fat or bone. Leukemias and lymphomas are malignant tumors affecting hematopoietic structures (structures pertaining to the formation of blood cells) including components of the immune system. Other malignant tumors include, but are not limited to, tumors of the nervous system (e.g. neurofibromatomas), germ cell tumors, and blastic tumors.

[0279] As used herein, neoplastic disease refers to any disorder involving cancer, including tumor development, growth, metastasis and progression.

[0280] As used herein, cancer is a term for diseases caused by or characterized by any type of malignant tumor, including metastatic cancers, lymphatic tumors, and blood cancers. Exemplary cancers include, but are not limited to, acute lymphoblastic leukemia, acute lymphoblastic leukemia, acute myeloid leukemia, acute promyelocytic leukemia, adenocarcinoma, adenoma, adrenal cancer, adrenocortical carcinoma, AIDS-related cancer, AIDS-related lymphoma, anal cancer, appendix cancer, astrocytoma, basal cell carcinoma, bile duct cancer, bladder cancer, bone cancer, osteosarcoma/malignant fibrous histiocytoma, brainstem glioma, brain cancer, carcinoma, cerebellar astrocytoma, cerebral astrocytoma/malignant glioma, ependymoma, medulloblastoma, supratentorial primitive neuroectodermal tumor, visual pathway or hypothalamic glioma, breast cancer, bronchial adenoma/carcinoid, Burkitt lymphoma, carcinoid tumor, carcinoma, central nervous system lymphoma, cervical cancer, chronic lymphocytic leukemia, chronic myelogenous leukemia, chronic myeloproliferative disorder, colon cancer, cutaneous T-cell lymphoma, desmoplastic small round cell tumor, endometrial cancer, ependymoma. epidermoid carcinoma, esophageal cancer, Ewing's sarcoma, extracranial germ cell tumor, extragonadal germ cell tumor, extrahepatic bile duct cancer, eye cancer/intraocular melanoma, eye cancer/retinoblastoma, gallbladder cancer, gallstone tumor, gastric/stomach cancer, gastrointestinal carcinoid tumor, gastrointestinal stromal tumor, giant cell tumor, glioblastoma multiforme, glioma, hairy-cell tumor, head and neck cancer, heart cancer, hepatocellular/liver cancer, Hodgkin lymphoma, hyperplasia, hyperplastic corneal nerve tumor, in situ carcinoma, hypopharyngeal cancer, intestinal ganglioneuroma, islet cell tumor, Kaposi's sarcoma, kidney/renal cell cancer, laryngeal cancer, leiomyoma tumor, lip and oral cavity cancer, liposarcoma, liver cancer, non-small cell lung cancer, small cell lung cancer, lymphomas, macroglobulinemia, malignant carcinoid, malignant fibrous histiocytoma of bone, malignant hypercalcemia, malignant melanomas, marfanoid habitus tumor, medullary carcinoma, melanoma, merkel cell carcinoma, mesothelioma, metastatic skin carcinoma, metastatic squamous neck cancer, mouth cancer, mucosal neuromas, multiple myeloma, mycosis fungoides, myelodysplastic syndrome, myeloma, myeloproliferative disorder, nasal cavity and paranasal sinus cancer, nasopharyngeal carcinoma, neck cancer, neural tissue cancer, neuroblastoma, oral cancer, oropharyngeal cancer, osteosarcoma, ovarian cancer, ovarian epithelial tumor, ovarian germ cell tumor, pancreatic cancer, parathyroid cancer, penile cancer, pharyngeal cancer, pheochromocytoma, pineal astrocytoma, pineal germinoma, pineoblastoma, pituitary adenoma, pleuropulmonary blastoma, polycythemia vera, primary brain tumor, prostate cancer, rectal cancer, renal cell tumor, reticulum cell sarcoma, retinoblastoma, rhabdomyosarcoma, salivary gland cancer, seminoma, Sezary syndrome, skin cancer, small intestine cancer, soft tissue sarcoma, squamous cell carcinoma, squamous neck carcinoma, stomach cancer, supratentorial primitive neuroectodermal tumor, testicular cancer, throat cancer, thymoma, thyroid cancer, topical skin lesion, trophoblastic tumor, urethral cancer, uterine/endometrial cancer, uterine sarcoma, vaginal cancer, vulvar cancer, Waldenström's macroglobulinemia or Wilm's tumor. Exemplary cancers commonly diagnosed in humans include, but are not limited to, cancers of the bladder, brain, breast, bone marrow, cervix, colon/rectum, kidney, liver, lung/bronchus, ovary, pancreas, prostate, skin, stomach, thyroid, or uterus. Exemplary cancers commonly diagnosed in dogs, cats, and other pets include, but are not limited to, lymphosarcoma, osteosarcoma, mammary tumors, mastocytoma, brain tumor, melanoma, adenosquamous carcinoma, carcinoid lung tumor, bronchial gland tumor, bronchiolar adenocarcinoma, fibroma, myxochondroma, pulmonary sarcoma, neurosarcoma, osteoma, papilloma, retinoblastoma, Ewing's sarcoma, Wilm's tumor, Burkitt's lymphoma, microglioma, neuroblastoma, osteoclastoma, oral neoplasia, fibrosarcoma, osteosarcoma and rhabdomyosarcoma, genital squamous cell carcinoma, transmissible venereal tumor, testicular tumor, seminoma, Sertoli cell tumor, hemangiopericytoma, histiocytoma, chloroma (e.g., granulocytic sarcoma), corneal papilloma, corneal squamous cell carcinoma, hemangiosarcoma, pleural mesothelioma, basal cell tumor, thymoma, stomach tumor, adrenal gland carcinoma, oral papillomatosis, hemangioendothelioma and cystadenoma, follicular lymphoma, intestinal lymphosarcoma, fibrosarcoma and pulmonary squamous cell carcinoma. Exemplary cancers diagnosed in rodents, such as a ferret, include, but are not limited to, insulinoma, lymphoma, sarcoma, neuroma, pancreatic islet cell tumor, gastric MALT lymphoma and gastric adenocarcinoma. Exemplary neoplasias affecting agricultural livestock include, but are not limited to, leukemia, hemangiopericytoma and bovine ocular neoplasia (in cattle); preputial fibrosarcoma, ulcerative squamous cell carcinoma, preputial carcinoma, connective tissue neoplasia and mastocytoma (in horses); hepatocellular carcinoma (in swine); lymphoma and pulmonary adenomatosis (in sheep); pulmonary sarcoma, lymphoma, Rous sarcoma, reticulo-endotheliosis, fibrosarcoma, nephroblastoma, B-cell lymphoma and lymphoid leukosis (in avian species); retinoblastoma, hepatic neoplasia, lymphosarcoma (lymphoblastic lymphoma), plasmacytoid leukemia and swimbladder sarcoma (in fish), caseous lymphadenitis (CLA): chronic, infectious, contagious disease of sheep and goats caused by the bacterium Corynebacterium pseudotuberculosis, and contagious lung tumor of sheep caused by jaagsiekte.

[0281] As used herein, a “metastasis” refers to the spread of cancer from one part of the body to another. For example, in the metastatic process, malignant cells can spread from the site of the primary tumor in which the malignant cells arose and move into lymphatic and blood vessels, which transport the cells to normal tissues elsewhere in an organism where the cells continue to proliferate. A tumor formed by cells that have spread by metastasis is called a “metastatic tumor,” a “secondary tumor” or a “metastasis.”

[0282] As used herein, an anticancer agent or compound (used interchangeably with “antitumor or antineoplastic agent”) refers to any agents, or compounds, used in anticancer treatment. These include any agents, when used alone or in combination with other compounds or treatments, that can alleviate, reduce, ameliorate, prevent, or place or maintain in a state of remission of clinical symptoms or diagnostic markers associated with neoplastic disease, tumors and cancer, and can be used in methods, combinations and compositions provided herein. Anticancer agents include antimetastatic agents. Exemplary anticancer agents include, but are not limited to, chemotherapeutic compounds (e.g., toxins, alkylating agents, nitrosoureas, anticancer antibiotics, antimetabolites, antimitotics, topoisomerase inhibitors), cytokines, growth factors, hormones, photosensitizing agents, radionuclides, signaling modulators, anticancer antibodies, anticancer oligopeptides, anticancer oligonucleotides (e.g., antisense RNA and siRNA), angiogenesis inhibitors, radiation therapy, or a combination thereof. Exemplary chemotherapeutic compounds include, but are not limited to, Ara-C, cisplatin, carboplatin, paclitaxel, doxorubicin, gemcitabine, camptothecin, irinotecan, cyclophosphamide, 6-mercaptopurine, vincristine, 5-fluorouracil, and methotrexate. As used herein, reference to an anticancer or chemotherapeutic agent includes combinations or a plurality of anticancer or chemotherapeutic agents unless otherwise indicated.

[0283] As used herein, a “chemosensitizing agent” is an agent which modulates, attenuates, reverses, or affects a cell's or organism's resistance to a given chemotherapeutic drug or compound. The terms “modulator”, “modulating agent”, “attenuator”, “attenuating agent”, or “chemosensitizer” can be used interchangeably to mean “chemosensitizing agent.” In some examples, a chemosensitizing agent can also be a chemotherapeutic agent. Examples of chemosensitizing agents include, but are not limited to, radiation, calcium channel blockers (e.g., verapamil), calmodulin inhibitors (e.g., trifluoperazine), indole alkaloids (e.g., reserpine), quinolines (e.g., quinine), lysosomotropic agents (e.g., chloroquine), steroids (e.g., progesterone), triparanol analogs (e.g., tamoxifen), detergents (e.g., Cremophor EL), texaphyrins, and cyclic antibiotics (e.g., cyclosporine).

[0284] As used herein, a subject includes any organism, including an animal for whom diagnosis, screening, monitoring or treatment is contemplated. Animals include mammals such as primates and domesticated animals. An exemplary primate is human.

[0285] As used herein, an “individual” can be a subject.

[0286] As used herein, a patient refers to a human subject exhibiting symptoms of a disease or disorder. Hence, a patient refers to a subject, such as a mammal, primate, human, or livestock subject, afflicted with a disease condition or for which a disease condition is to be determined or risk of a disease condition is to be determined.

[0287] As used herein, treatment of a subject that has a condition, disorder or disease means any manner of treatment in which the symptoms of the condition, disorder or disease are ameliorated or otherwise beneficially altered. Treatment encompasses any pharmaceutical use of the viruses described and provided herein.

[0288] As used herein, amelioration of the symptoms of a particular disease or disorder by a treatment, such as by administration of a pharmaceutical composition or other therapeutic, refers to any lessening, whether permanent or temporary, lasting or transient, of the symptoms that can be attributed to or associated with administration of the composition or therapeutic.

[0289] As used herein, treatment of a subject that has a hyperproliferative disease or disorder, such as a neoplastic disease, including a tumor or metastasis, means any manner of treatment in which the symptoms of having the disease are ameliorated or otherwise beneficially altered. For example, typically, treatment of a tumor or metastasis in a subject encompasses any manner of treatment that results in slowing of tumor growth, lysis of tumor cells, reduction in the size of the tumor, prevention of new tumor growth, or prevention of metastasis of a primary tumor, including inhibition vascularization of the tumor, tumor cell division, tumor cell migration or degradation of the basement membrane or extracellular matrix.

[0290] As used herein, therapeutic effect means an effect resulting from treatment of a subject that alters, typically improves or ameliorates the symptoms of a disease or condition or that cures a disease or condition. A therapeutically effective amount refers to the amount of a composition, molecule or compound which results in a therapeutic effect following administration to a subject.

[0291] As used herein, effective treatment or efficacy of treatment with a virus is one that can increase survival compared to the absence of treatment therewith. For example, a virus is an effective treatment if it stabilizes disease, causes tumor regression, decreases severity of disease or slows down or reduces metastasizing of the tumor.

[0292] As used herein, dosing regime refers to the amount of agent, for example, oncolytic virus administered, and the frequency of administration. The dosing regime is a function of the disease or condition to be treated, and thus can vary.

[0293] As used herein, frequency of administration refers to the time between successive administrations of treatment. For example, frequency can be days, weeks or months. For example, frequency can be more than once weekly, for example, twice a week, three times a week, four times a week, five times a week, six times a week or daily. Frequency also can be one, two, three or four weeks. The particular frequency is function of the particular disease or condition treated.

[0294] As used herein, a “cycle of administration” refers to the repeated schedule of the dosing regime of administration of an oncolytic virus therapy that is repeated over successive administrations. For example, an exemplary cycle of administration is a 28 day cycle that can be repeated.

[0295] As used herein, when referencing dosage based on mg/kg of the subject, an average human subject is considered to have a mass of about 70 kg-75 kg, such as 70 kg.

[0296] As used herein, a composition refers to any mixture. It can be a solution, suspension, liquid, gel, powder, paste, aqueous, non-aqueous or any combination thereof.

[0297] As used herein, a formulation refers to a composition containing at least one active pharmaceutical or therapeutic agent and one or more excipients.

[0298] As used herein, a co-formulation refers to a composition containing two or more active or pharmaceutical or therapeutic agents and one or more excipients.

[0299] As used herein, a combination refers to any association between or among two or more items. The combination can be two or more separate items, such as two compositions or two collections, can be a mixture thereof, such as a single mixture of the two or more items, or any variation thereof. The elements of a combination are generally functionally associated or related.

[0300] As used herein, direct administration refers to administration of a composition without dilution.

[0301] As used herein, a single dosage formulation refers to a formulation for use only once. Typically, a single dosage formulation is for direct administration.

[0302] As used herein, a multiple dosage formulation refers to a formulation for use in repeat administrations.

[0303] As used herein, “intravenous administration” refers to delivery of a therapeutic directly into a vein.

[0304] As used herein, a kit is a packaged combination, optionally, including instructions for use of the combination and/or other reactions and components for such use.

[0305] As used herein, an “article of manufacture” is a product that is made and sold. As used throughout this application, the term is intended to encompass articles containing a vaccinia virus alone or in combination with a second therapy or a therapeutic energy source contained in the same or separate articles of packaging.

[0306] As used herein, a device refers to a thing made or adapted for a particular task. Exemplary of devices herein are devices that cover or coat or are capable of contacting the epidermis or surface of the skin. Examples of such devices include, but are not limited to, a wrap, bandage, bind, dress, suture, patch, gauze or dressing.

[0307] As used herein, the singular forms “a,” “an” and “the” include plural referents unless the context clearly dictates otherwise.

[0308] As used herein, ranges and amounts can be expressed as “about” or “approximately” a particular value or range. “About” or “approximately” also includes the exact amount. Hence, “about 5 milliliters” means “about 5 milliliters” and also “5 milliliters.” Generally “about” includes an amount that would be expected to be within experimental error.

[0309] As used herein, “about” or “about the same” means within an amount that one of skill in the art would consider to be the same or to be within an acceptable range of error. For example, typically, for pharmaceutical compositions, within at least 1%, 2%, 3%, 4%, 5% or 10% is considered about the same. Such amount can vary depending upon the tolerance for variation in the particular composition by subjects.

[0310] As used herein, “optional” or “optionally” means that the subsequently described event or circumstance does or does not occur, and that the description includes instances where said event or circumstance occurs and instances where it does not.

[0311] As used herein, the abbreviations for any protective groups, amino acids and other compounds, are, unless indicated otherwise, in accord with their common usage, recognized abbreviations, or the IUPAC-IUB Commission on Biochemical Nomenclature (see, (1972) Biochem. 11:1726).

[0312] For clarity of disclosure, and not by way of limitation, the detailed description is divided into the subsections that follow.

### B. ONCOLYTIC VIRUS THERAPY

[0313] Provided herein are combinations therapies of an oncolytic virus, such as a vaccinia virus, and a modulator(s) of the innate immune system for use in maintaining the infectivity and/or bioactivity of the oncolytic virus in bodily fluids. In particular, the adjunct therapies provided herein maintain the infectivity of the oncolytic virus (e.g. vaccinia virus) for treating proliferative diseases and conditions, such as tumors. For example, the innate immune system is the first line of host defense and functions in advance of the adaptive immune system to recognize and inactivate or clear foreign pathogens. Consistent with innate immune involvement, oncolytic viruses, such as vaccinia virus, exhibit a loss of infectivity and rapid elimination of the virus from the blood, which can undermine the utility of the virus to infect target cells, such as cancer cells, throughout the body. Thus, therapies that reduce virus clearance and/or inactivation by the innate immune system, and thereby increase virus infectivity, are desired.

[0314] In particular, the complement system is a primary pathway involved in the innate immune-mediated inactivation of foreign substances, such as bacteria and viruses. Thus, provided herein are combinations and compositions of an oncolytic virus and an inhibitor of the complement system (e.g. anti-C5 antibody) for use in methods of co-administration for maintaining the infectivity and/or bioactivity of the oncolytic virus for treating a proliferative disorder, such as a tumor.

[0315] In addition, it is also found herein that lipid emulsions (e.g. 20% soybean oil intravenous fat emulsion) either co-formulated or co-administered with a virus reduce virus inactivation and/or clearance, and hence increase virus infectivity. Thus, also provided herein are lipid-emulsion oncolytic virus compositions or combinations containing a virus and a lipid emulsion for use in methods for maintaining the infectivity of the oncolytic virus for treating a proliferative disorder, such as a tumor. A lipid-emulsion oncolytic virus also can be used in methods and uses of adjunct therapy with a complement inhibitor (e.g. anti-C5 antibody) or other immune modulator agent or therapeutic agent.

[0316] 1. Oncolytic Viruses

[0317] Oncolytic viruses are viruses that accumulate in tumor cells and replicate in tumor cells. By virtue of replication in the cells, and optional delivery of therapeutic agents encoded by the virus, tumor cells are lysed, and the tumor shrinks and can be eliminated. Also, many oncolytic viruses such as vaccinia viruses have a broad host and cell type range. For example, vaccinia viruses can accumulate in immunoprivileged cells or immunoprivileged tissues, including tumors and/or metastases, and also including wounded tissues and cells. Among oncolytic viruses being studied include, for example, adenovirus, Herpes Simplex Virus, Vesticular Stomatic virus, Reovirus, Coxsackie virus and Vaccinia virus. Vaccinia virus strains have been shown to specifically colonize solid tumors, while not infecting other organs (see, e.g., Zhang et al. (2007) Cancer Res 67:10038-10046; Yu et al., (2004) Nat Biotech 22:313-320; Heo et al., (2011) Mol Ther 19:1170-1179; Liu et al. (2008) Mol Ther 16:1637-1642; Park et al., (2008) Lancet Oncol, 9:533-542).

[0318] Various oncolytic viruses, including vaccinia viruses, have been demonstrated to exhibit antitumor activities. In one study, for example, nude mice bearing nonmetastatic colon adenocarcinoma cells were systemically injected with a WR strain of vaccinia virus modified by having a vaccinia growth factor deletion and an enhanced green fluorescence protein inserted into the thymidine kinase locus. The virus was observed to have antitumor effect, including one complete response, despite a lack of exogenous therapeutic genes in the modified virus (McCart et al. (2001) Cancer Res 1:8751-8757). In another study, vaccinia melanoma oncolysate (VMO) was injected into sites near melanoma positive lymph nodes in a Phase III clinical trial of melanoma patients. As a control, New York City Board of Health strain vaccinia virus (VV) was administered to melanoma patients. The melanoma patients treated with VMO had a survival rate better than that for untreated patients, but similar to patients treated with the VV control (Kim et al. (2001) Surgical Oncol 10:53-59).

[0319] LIVP strains of vaccinia virus also have been used for the diagnosis and therapy of tumors, and for the treatment of wounded and inflamed tissues and cells (see e.g. Zhang et al. (2007) Surgery, 142:976-983; Lin et al. (2008) J. Clin. Endocrinol., Metab., 93:4403-7; Kelly et al. (2008) Hum gene There., 19:774-782; Yu et al. (2009) Mol Cancer Ther., 8:141-151; Yu et al. (2009) Mol Cancer, 8:45; U.S. Pat. No. 7,588,767; U.S. Pat. No. 8,052,968; and U.S. Published application No. US20040234455). For example, when intravenously administered, LIVP strains have been demonstrated to accumulate in internal tumors at various loci in vivo, and have been demonstrated to effectively treat human tumors of various tissue origin, including, but not limited to, breast tumors, thyroid tumors, pancreatic tumors, metastatic tumors of pleural mesothelioma, squamous cell carcinoma, lung carcinoma and ovarian tumors. LIVP strains of vaccinia, including attenuated forms thereof, exhibit less toxicity than WR strains of vaccinia virus, and results in increased and longer survival of treated tumor-bearing animal models (see e.g. U.S. Published Patent Appl. No. US20110293527).

[0320] In addition, oncolytic viruses possess a large carrying capacity for foreign genes that can be inserted into the vaccinia genome. Hence, oncolytic viruses can be optimized to encode therapeutic genes, including anti-cancer genes, that can increase the therapeutic or anti-tumor activity of the virus. In particular, vaccinia virus can carry up to 25 kb of exogenous DNA fragments (approximately 12% of the vaccinia genome size). The ability to modify viruses, such as vaccinia viruses, is facilitated due to the high sequence homology among different strains for designing and generating modified viruses in other strains. Techniques for production of modified viruses, including vaccinia strains, by genetic engineering are well established (Moss (1993) Curr. Opin. Genet. Dev. 3: 86-90; Broder and Earl (1999) Mol. Biotechnol. 13: 223-245; Timiryasova et al. (2001) Biotechniques 31: 534-540).

[0321] Vaccinia viruses also exhibit low toxicity. While most oncolytic viruses are natural pathogens, vaccinia virus has a unique history in its widespread application as a smallpox vaccine that has resulted in an established track record of safety in humans. Toxicities related to vaccinia administration occur in less than 0.1% of cases, and can be effectively addressed with immunoglobulin administration.

[0322] Although oncolytic viruses, such as vaccinia viruses, can accumulate in immunoprivileged cells and tissues, the systemic administration of viruses exposes them to the immune system. An active immune response against the virus can develop quickly, resulting in clearance and inactivation of the virus in the serum. For example, pharmacokinetic (PK) analysis of virus administered intravenously typically reveals that there is little detectable live virus or only a low titer live virus soon after administration. The result is that effectiveness of the virus to accumulate in desired tissues is reduced and/or a larger concentration of virus must be administered to obtained a desired efficacy. Therefore, therapies and methods that prolong the titer, PK or half-life of the virus in the circulation are desired.

[0323] 2. Virus Therapies to Increase Infectivity

[0324] As indicated above, therapeutic uses of oncolytic viruses (e.g. vaccinia viruses) are hampered by the rapid and efficient inactivation and loss of infectivity of the virus after administration into the body. The oncolytic virus (e.g. vaccinia virus) can rapidly lose its infectivity after exposure to blood. Components of the innate and acquired immune systems are likely responsible for the inactivity of the viruses.

[0325] Among the immune system mechanisms involved in virus inactivation is the complement system. Complement is activated upon exposure to foreign substances, including bacteria and viruses. As described in more detail in Section D below, the activation is the result of a cascade of enzymatic and biochemical changes in the proteins of the complement system, ultimately leading to the binding of complement to the surface of the foreign substance. The infectivity of the virus is reduced by this binding either directly as a function of the binding itself or through subsequent interactions that the bound complement components can direct. The immediate effect is rapid and efficient loss of infectivity of the exposed virus. Secondary effects can include more rapid phagocytosis and destruction of the complement-bound virus by macrophages and other blood cells and cells of the reticuloendothelial system, and elimination of the virus from the blood stream. Loss of infectivity and rapid elimination of the virus from the blood undermines the utility of the virus if its intended use is to infect target cells, such as cancer cells, throughout the body.

[0326] Provided herein are combinations, composition and methods that reduce or eliminate complement-mediated inactivation of the virus, and that thereby enhance the intended oncolytic use of the virus. In particular, it is found herein that co-administration of an oncolytic virus to a subject in the presence of a complement inhibitor, separately or formulated together, results in decreased serum inactivation of the virus and an increase in virus titer and recovery of the virus from the serum. The complement inhibitor can be any inhibitor that targets a complement pathway, but generally is an inhibitor that targets a component in the common pathway of complement activation, and thereby inhibits the terminal portion of the complement pathway. Exemplary of such inhibitors are inhibitors that target the C3 or C5 complement components. Adjunct therapies with a complement inhibitor can be used in methods of administration of the virus to any body fluid or compartment in the body in which complement is present, and in particular by systemic administration methods to the blood.

[0327] Among complement inhibitors, it is found herein that anti-complement antibody inhibitors (e.g. anti-C5 antibody, for example eculizumab) offer protective benefits to the virus that do not exist with other complement inhibitors, including by generalized complement inhibition achieved by heat inactivation. For example, as shown in the Examples herein, exposure of virus to blood cells in the presence of serum containing an anti-C5 antibody (e.g. eculizumab) results in a substantial increase in virus that is bound to blood cells compared to conditions in which the anti-C5 antibody (e.g. eculizumab) is not present. Based on the total increase in recovery of virus, along with an increase propensity to bind to blood cells, the results demonstrate that cell binding of the virus preserves infectivity and provides a protective advantage to the virus. In some cases, the anti-complement antibody (e.g. anti-C5 antibody, such as eculizumab) can increase the infectivity of the virus that is bound to blood cells in serum in excess of that obtained in the absence of serum. These results are not achieved when the complement in the serum is instead inhibited by heat inactivation. Thus, the mechanism for this protective effect could be that the anti-complement antibody itself binds to a complement component (e.g. C5) already coated on the virus, and the bound antibody then interacts with its Fc receptors on the surface of blood cells.

[0328] The adjunct therapies provided herein employing separate administration of a complement inhibitor (e.g. anti-complement antibody), such as by co-administration or co-formulation with an oncolytic virus, offers advantages compared to prior art methods. Strategies employed in the art rely on engineering the oncolytic virus to encode heterologous immunomodulatory polypeptides that can attenuate the immune response (see e.g. U.S. Patent Publication No. US2010/0178684). Such strategies, however, are not ideal because in order to express the immunomodulatory protein, the virus must first infect and enter the host cell and/or replicate in the host cells. By this time, virus can already be exposed to immune modulators in the serum that inactivate or clear the virus so that it never reaches the host cell. Further, after infection, a virus produces its own complement-control proteins that can circumvent complement-mediated clearance. For example, vaccinia virus encodes a complement control protein designated VCP that inhibits complement activation (Sahu et al. (1998) J. Immunol, 160:5596-5604). Thus, delivering a virus that only encodes a complement protein after infection of host cells fails to address the problem of virus neutralization and inactivation that occurs by immune modulators prior to infection of cells.

[0329] In contrast, in the methods provided herein, the complement inhibitor (e.g. anti-complement antibody) can be administered prior to, simultaneously, intermittently, or subsequently to administration of the oncolytic virus. Typically, the complement inhibitor (e.g. anti-complement antibody, such as anti-C5 antibody) is administered prior to delivery of the oncolytic virus in order to pretreat the serum or other bodily fluid so that complement is inhibited upon delivery of the virus to the bodily fluid. Thus, when the virus is delivered to the bodily fluid, the virus is not susceptible to virus neutralization, clearance or inactivation that would otherwise occur in the absence of the complement inhibitor (e.g. anti-complement antibody, such as anti-C5 antibody).

[0330] It is also found herein that adjunct therapies employing lipid emulsions also offer protective effects to the virus, and thereby increases virus infectivity. Lipid emulsions are fat emulsions that contain various phospholipids and fatty acids. Lipid emulsions typically are administered for parenteral nutrition, but also have been shown to exhibit immunomodulatory properties. For example, lipid emulsions have been reported to suppress NK cell cytotoxicity (Roussev et al. (2007) Am. J. Reprod. Immunol., 57:262-9); inhibit the synthesis of complement proteins, such as C2 and C4, by macrophages (Strunk et al. (1979) Pediatric Research, 13:188-193; Strunk et al. (1983) Lipids, 18:493-500)); and inhibit antibody-dependent cellular cytotoxicity (ADCC) (Loo et al. (1982) Journal of Infectious Diseases, 146:64-70). In adjunct therapies provided herein, a lipid emulsion can be co-administered to a bodily fluid prior to, simultaneously, intermittently or subsequently to administration or delivery of an oncolytic virus, and typically prior to administration of an oncolytic virus. In such examples, the virus infectivity of the oncolytic virus is increased compared to therapies that do not include co-administration (e.g. preadministration) with a lipid emulsion.

[0331] It is also found herein, however, that lipid emulsions can also increase virus infectivity when the virus is pretreated with lipid in an emulsion (i.e. lipid-emulsion oncolytic virus), even at concentrations that are substantially lower than would be required in preadministration methods. For example, it is found herein that pretreatment of an equal volume of an oncolytic virus stock with a standard 20% soybean intravenous fat emulsion (e.g. Intralipid® lipid emulsion) for at least 1 hour at 37° C., and typically up to or between 1 to 4 hours, followed by further dilution of the pretreated virus stock to an appropriate concentration for use or administration, results in an increased titer and recovery of the virus in serum, and hence increased virus infectivity. It is likely that pretreatment with lipids and other components in the lipid emulsion alters the virus coat, and thereby changes (e.g. reduces) the interaction of the virus with components of the innate immune system, such as complement. Thus, while lipid emulsions have been shown to suppress natural killer (NK) cells and other immune processes, it is believed that the effect of the lipid emulsions on virus infectivity of a lipid-pretreated virus is because the lipid component alters the properties of the virus as opposed to direct effects of the lipid component or emulsion on immune cells. For example, administration of a lipid emulsion to serum prior to addition of virus, and at concentrations similar to the concentrations of lipid present when the same dosage of virus is administered as a lipid-treated virus, do not reduce the amount of serum inactivation of the virus in the same manner as the lipid-treated virus.

[0332] The following sections describe exemplary oncolytic viruses, including vaccinia viruses, exemplary complement inhibitors and lipid emulsions that can be used in combination with an oncolytic virus as descried herein. Exemplary dosage regimes and methods for treatment of proliferative disorders using the oncolytic virus therapies also are described.

### C. ONCOLYTIC VIRUS

[0333] Provided herein are methods to increase the infectivity of an oncolytic virus by administration of the virus in combination or formulation with an agent(s), such as a complement inhibitors or lipid component, that increases virus titer or half-life compared to the absence of the agent(s). Oncolytic viruses are characterized by their largely tumor cell specific replication, resulting in tumor cell lysis and efficient tumor regression. Oncolytic viruses effect treatment by colonizing or accumulating in tumor cells, including metastatic tumor cells such as circulating tumor cells, and replicating. They provide an effective weapon in the tumor treatment arsenal. Oncolytic viruses include Newcastle Disease virus, parvovirus, vaccinia virus, reovirus, measles virus, vesticular stomatitis virus (VSV), oncolytic adenoviruses and herpes viruses. In many cases, tumor selectivity is an inherent property of the virus, such as vaccinia viruses and other oncolytic viruses. Generally oncolytic viruses effect treatment by replicating in tumors or tumor cells resulting in lysis.

[0334] Oncolytic viruses for use in the combinations, compositions, use or methods provided here are well known to one of skill in the art and include, for example, vesicular stomatitis virus, see, e.g., U.S. Pat. Nos. 7,731,974, 7,153,510, 6,653,103 and U.S. Pat. Pub. Nos. 2010/0178684, 2010/0172877, 2010/0113567, 2007/0098743, 20050260601, 20050220818 and EP Pat. Nos. 1385466, 1606411 and 1520175; herpes simplex virus, see, e.g., U.S. Pat. Nos. 7,897,146, 7,731,952, 7,550,296, 7,537,924, 6,723,316, 6,428,968 and U.S. Pat. Pub. Nos. 2011/0177032, 2011/0158948, 2010/0092515, 2009/0274728, 2009/0285860, 2009/0215147, 2009/0010889, 2007/0110720, 2006/0039894 and 20040009604; retroviruses, see, e.g., U.S. Pat. Nos. 6,689,871, 6,635,472, 5,851,529, 5,716,826, 5,716,613 and U.S. Pat. Pub. No. 20110212530; and adeno-associated viruses, see, e.g., U.S. Pat. Nos. 8,007,780, 7,968,340, 7,943,374, 7,906,111, 7,927,585, 7,811,814, 7,662,627, 7,241,447, 7,238,526, 7,172,893, 7,033,826, 7,001,765, 6,897,045, and 6,632,670.

[0335] Oncolytic viruses also include viruses that have been genetically altered to attenuate their virulence, to improve their safety profile, enhance their tumor specificity, and they have also been equipped with additional genes, for example cytotoxins, cytokines, prodrug converting enzymes to improve the overall efficacy of the viruses (see, e.g., Kirn et al., (2009) Nat Rev Cancer 9:64-71; Garcia-Aragoncillo et al., (2010) Curr Opin Mol Ther 12:403-411; see U.S. Pat. Nos. 7,588,767, 7,588,771, 7,662,398 and 7,754,221 and U.S. Pat. Publ. Nos. 2007/0202572, 2007/0212727, 2010/0062016, 2009/0098529, 2009/0053244, 2009/0155287, 2009/0117034, 2010/0233078, 2009/0162288, 2010/0196325, 2009/0136917 and 2011/0064650.

[0336] For example, other activities can be introduced and/or anti-tumor activity can be enhanced by including nucleic acid encoding a heterologous gene product that is a therapeutic and/or diagnostic agent or agents. In some examples, the oncolytic viruses provide oncolytic therapy of a tumor cell without the expression of a therapeutic gene. In other examples, the oncolytic viruses can express one or more genes whose products are useful for tumor therapy. For example, a virus can express proteins that cause cell death or whose products cause an anti-tumor immune response. Such genes can be considered therapeutic genes. A variety of therapeutic gene products, such as toxic or apoptotic proteins, or siRNA, are known in the art, and can be used with the oncolytic viruses in the combinations, compositions and methods provided herein. The therapeutic genes can act by directly killing the host cell, for example, as a channel-forming or other lytic protein, or by triggering apoptosis, or by inhibiting essential cellular processes, or by triggering an immune response against the cell, or by interacting with a compound that has a similar effect, for example, by converting a less active compound to a cytotoxic compound. Exemplary thereof are gene products selected from among an anticancer agent, an anti-metastatic agent, an antiangiogenic agent, an immunomodulatory molecule, an antigen, a cell matrix degradative gene, genes for tissue regeneration and reprogramming human somatic cells to pluripotency, and other genes described herein or known to one of skill in the art. In these examples, the tumor-specific replication process is capable of directly killing the infected tumor cells (oncolytic viruses) and/or strongly amplifying the copy number of the therapeutic gene carried by the viral vector.

[0337] Exemplary therapeutic genes that can be inserted into any oncolytic virus are described herein in below and exemplified with respect to vaccinia virus. It is understood that an oncolytic virus can be modified to include nucleic acid sequences encoding any of the therapeutic genes described below or any known to one of skill in the art. The sequence of nucleotides encoding a gene is typically inserted into or in place of a non-essential gene or region in the genome of the virus. Thus, oncolytic viruses herein also include viruses that contain nucleic acid encoding a heterologous gene product that is a therapeutic and/or diagnostic agent or agents. Exemplary of such oncolytic viruses are viruses derived from the Lister strain, such as LIVP, including any containing nucleic acid encoding a heterologous gene product (e.g. GLV-1h68 and derivatives thereof). Such viruses are further described in detail below. Among other therapeutic vaccinia viruses are the virus designated JX-594, which is a vaccinia virus that expresses GM-CSF described, for example, in U.S. Pat. No. 6,093,700, and the Wyeth strain vaccinia virus designated JX-594, which is a TK-deleted vaccinia virus that expresses GM-CSF (see, International PCT application No WO 2004/014314, U.S. Pat. No. 5,364,773; Mastrangelo et al. (1998) Cancer Gene Therapy 6:409-422; Kim et al. (2006) Molecular Therapeutics 14:361-370). Other oncolytic viruses include, but are not limited to, JX-954 (Parato et al. (2012) Mol. Ther., 20:749-58); ColoAd1 (Kuhn et al. (2008) PLoS One, 3:e2409; MV-CEA and MV-NIS (Msaouel et al. (2009) Curr. Opin. Mol. Ther., 11:43-53); Synco-B18R (Fu et al. (2012) Mol. Ther., 20:1871-81); OncoVEX GM-CSF (Kaufman et al. (2010) Future Oncol. 6:941-9), Reo-001 (Reolysin®, Galanis et al. (2012) Mol. Ther., 20:1998-2003); NTX-010 (Morton et al. (2010) Pediatr Blood Cancer, 55:295-303); and Coxsackieviruses A13, A15, A18, A20 and A21 (e.g. CAVATAK™, which is coxsackievirus A21.)

[0338] In addition, adenoviruses, such as the ONYX viruses and others, have been modified, such as be deletion of EA1 genes, so that they selectively replicate in cancerous cells, and, thus, are oncolytic. Adenoviruses also have been engineered to have modified tropism for tumor therapy and also as gene therapy vectors. Exemplary of such is ONYX-015, H101 and Ad5ΔCR (Hallden and Portella (2012) Expert Opin Ther Targets, 16:945-58) and TNFerade (McLoughlin et al. (2005) Ann. Surg. Oncol., 12:825-30). A conditionally replicative adenovirus is Oncorine®, which is approved in China.

[0339] Any oncolytic virus, such as any described above or herein or others known in the art, can benefit from the adjunct therapies provided herein. Exemplary oncolytic viruses for use in the adjunct therapies provided herein are further described below. In particular examples, the oncolytic virus is a vaccinia virus, such as an LIVP, Western Reserve or Copenhagen strain of virus, or a recombinant or modified virus thereof that encodes a heterologous gene product.

[0340] 1. Vaccinia Viruses

[0341] Vaccinia viruses are oncolytic viruses that possess a variety of features that make them particularly suitable for use in treatment of hyperproliferative diseases and disorders, such as wound and cancer gene therapy. For example, vaccinia is a cytoplasmic virus, thus, it does not insert its genome into the host genome during its life cycle. Unlike many other viruses that require the host's transcription machinery, vaccinia virus can support its own gene expression in the host cell cytoplasm using enzymes encoded in the viral genome. Vaccinia viruses also have a broad host and cell type range. In particular vaccinia viruses can accumulate in immunoprivileged cells or immunoprivileged tissues, including tumors and/or metastases, and also including wounded tissues and cells. Yet, unlike other oncolytic viruses, vaccinia virus can typically be cleared from the subject to whom the viruses are administered by activity of the subject's immune system, and hence are less toxic than other viruses such as adenoviruses. Thus, while the viruses can typically be cleared from the subject to whom the viruses are administered by activity of the subject's immune system, viruses can nevertheless accumulate, survive and proliferate in immunoprivileged cells and tissues such as tumors because such immunoprivileged areas are isolated from the host's immune system.

[0342] Vaccinia viruses also can be easily modified by insertion of heterologous genes. This can result in the attenuation of the virus and/or permit delivery of therapeutic proteins. For example, vaccinia virus genome has a large carrying capacity for foreign genes, where up to 25 kb of exogenous DNA fragments (approximately 12% of the vaccinia genome size) can be inserted. The genomes of several of the vaccinia strains have been completely sequenced, and many essential and nonessential genes identified. Due to high sequence homology among different strains, genomic information from one vaccinia strain can be used for designing and generating modified viruses in other strains. Finally, the techniques for production of modified vaccinia strains by genetic engineering are well established (Moss, Curr. Opin. Genet. Dev. 3 (1993), 86-90; Broder and Earl, Mol. Biotechnol. 13 (1999), 223-245; Timiryasova et al., Biotechniques 31 (2001), 534-540).

[0343] Various vaccinia viruses have been demonstrated to exhibit antitumor activities. In one study, for example, nude mice bearing nonmetastatic colon adenocarcinoma cells were systemically injected with a WR strain of vaccinia virus modified by having a vaccinia growth factor deletion and an enhanced green fluorescence protein inserted into the thymidine kinase locus. The virus was observed to have antitumor effect, including one complete response, despite a lack of exogenous therapeutic genes in the modified virus (McCart et al. (2001) Cancer Res 1:8751-8757). In another study, vaccinia melanoma oncolysate (VMO) was injected into sites near melanoma positive lymph nodes in a Phase III clinical trial of melanoma patients. As a control, New York City Board of Health strain vaccinia virus (VV) was administered to melanoma patients. The melanoma patients treated with VMO had a survival rate better than that for untreated patients, but similar to patients treated with the VV control (Kim et al. (2001) Surgical Oncol 10:53-59).

[0344] LIVP strains of vaccinia virus also have been used for the diagnosis and therapy of tumors, and for the treatment of wounded and inflamed tissues and cells (see e.g. Zhang et al. (2007) Surgery, 142:976-983; Lin et al. (2008) J. Clin. Endocrinol., Metab., 93:4403-7; Kelly et al. (2008) Hum gene There., 19:774-782; Yu et al. (2009) Mol Cancer Ther., 8:141-151; Yu et al. (2009) Mol Cancer, 8:45; U.S. Pat. No. 7,588,767; U.S. Pat. No. 8,052,968; and U.S. Published application No. US20040234455). For example, when administered (e.g. intravenously administered or directly administered to a tissue), LIVP strains have been demonstrated to accumulate in internal tumors at various loci in vivo, and have been demonstrated to effectively treat human tumors of various tissue origin, including, but not limited to, breast tumors, thyroid tumors, pancreatic tumors, metastatic tumors of pleural mesothelioma, squamous cell carcinoma, lung carcinoma and ovarian tumors. LIVP strains of vaccinia, including attenuated forms thereof, exhibit less toxicity than WR strains of vaccinia virus, and results in increased and longer survival of treated tumor-bearing animal models (see e.g. U.S. Published Patent Appl. No. US20110293527).

[0345] Vaccinia is a cytoplasmic virus, thus, it does not insert its genome into the host genome during its life cycle. Vaccinia virus has a linear, double-stranded DNA genome of approximately 180,000 base pairs in length that is made up of a single continuous polynucleotide chain (Baroudy et al. (1982) Cell, 28:315-324). The structure is due to the presence of 10,000 base pair inverted terminal repeats (ITRs). The ITRs are involved in genome replication. Genome replication is believed to involve self-priming, leading to the formation of high molecular weight concatemers (isolated from infected cells) which are subsequently cleaved and repaired to make virus genomes. See, e.g., Traktman, P., Chapter 27, Poxvirus DNA Replication, pp. 775-798, in DNA Replication in Eukaryotic Cells, Cold Spring Harbor Laboratory Press (1996). The genome encodes for approximately 250 genes. In general, the nonsegmented, noninfectious genome is arranged such that centrally located genes are essential for virus replication (and are thus conserved), while genes near the two termini effect more peripheral functions such as host range and virulence. Vaccinia viruses practice differential gene expression by utilizing open reading frames (ORFs) arranged in sets that, as a general principle, do not overlap.

[0346] Vaccinia virus possesses a variety of features for use in cancer gene therapy and vaccination including broad host and cell type range, and low toxicity. For example, while most oncolytic viruses are natural pathogens, vaccinia virus has a unique history in its widespread application as a smallpox vaccine that has resulted in an established track record of safety in humans. Toxicities related to vaccinia administration occur in less than 0.1% of cases, and can be effectively addressed with immunoglobulin administration. In addition, vaccinia virus is an attractive therapeutic virus because it possesses a large carrying capacity for foreign genes (up to 25 kb of exogenous DNA fragments, which is approximately 12% of the vaccinia genome size can be inserted into the vaccinia genome), has high sequence homology among different strains for designing and generating modified viruses in other strains, and the techniques for production of modified vaccinia strains by genetic engineering are well established (Moss (1993) Curr. Opin. Genet. Dev. 3: 86-90; Broder and Earl (1999) Mol. Biotechnol. 13: 223-245; Timiryasova et al. (2001) Biotechniques 31: 534-540). Vaccinia virus strains have been shown to specifically colonize solid tumors, while not infecting other organs (see, e.g., Zhang et al. (2007) Cancer Res 67:10038-10046; Yu et al., (2004) Nat Biotech 22:313-320; Heo et al., (2011) Mol Ther 19:1170-1179; Liu et al. (2008) Mol Ther 16:1637-1642; Park et al., (2008) Lancet Oncol, 9:533-542).

[0347] A variety of vaccinia virus strains can be used in the combinations, compositions and methods herein, including, but not limited to, Western Reserve (WR) (SEQ ID NO: 12), Copenhagen (SEQ ID NO: 13), Tashkent, Tian Tan, Lister, Wyeth, IHD-J, and IHD-W, Brighton, Ankara, MVA, Dairen I, LIPV, LC16M8, LC16MO, LIVP, WR 65-16, Connaught, New York City Board of Health, or modified forms thereof encoding a heterologous gene product. Exemplary of known viruses are set forth in Table 3. For example, among vaccinia viruses for use in the combinations, compositions or methods provided herein include, but are not limited to, Lister strain or LIVP strain of vaccinia viruses or modified forms thereof. For example, a recombinant derivative of LIVP, designated GLV-1h68 (set forth in SEQ ID NO: 3; GenBank Acc. No. EU410304) and GLV-1h64 (set forth in SEQ ID NO: 14) exhibit tumor targeting properties and an improved safety profile compared to its parental LIVP strain (set forth in SEQ ID NO: 2) and the WR strain (Zhang et al. (2009) Mol. Genet. Genomics, 282:417-435).

TABLE 3

| | | Reference (e.g. |
|---|---|---|
| | | GenBank |
| Name | Abbreviations | Accession No.) |
| Vaccinia virus strain | WR | AY243312 |
| Western Reserve | | |
| Vaccinia virus strain | COP | M35027 |
| Copenhagen | | |
| Vaccinia Lister major | LIST | AY678276 |
| strain | | |
| Vaccinia Lister isolate | LC | AY678277 |
| LC16MO | | |
| Vaccinia Lister clone | VACV107 | DQ121394 |
| VACV107 | | |
| Vaccinia virus strain | ACAM | AY313847 |
| ACAM2000 | | |
| Vaccinia virus strain | DUKE | DQ439815; Li et al. |
| DUKE | | (2006) Virology J, |
| | | 3: 88 |
| Vaccinia virus strain | MVA | U94848 |
| Ankara | | |
| Vaccinia virus Clone3 | CLONE3 | AY138848 |

[0348] Lister and LIVP Strains

[0349] Exemplary vaccinia viruses are Lister or LIVP vaccinia viruses. Lister (also referred to as Elstree) vaccinia virus is available from any of a variety of sources. For example, the Elstree vaccinia virus is available at the ATCC under Accession Number VR-1549. The Lister vaccinia strain has high transduction efficiency in tumor cells with high levels of gene expression.

[0350] The vaccinia virus provided in the combinations, compositions and methods herein can be based on modifications to the Lister strain of vaccinia virus. LIVP is a vaccinia strain derived from Lister (ATCC Catalog No. VR-1549). As described elsewhere herein, the LIVP strain can be obtained from the Lister Institute of Viral Preparations, Moscow, Russia; the Microorganism Collection of FSRI SRC VB Vector; or can be obtained from the Moscow Ivanovsky Institute of Virology (C0355 K0602). The LIVP strain was used for vaccination throughout the world, particularly in India and Russia, and is widely available. LIVP and its production are described, for example, in U.S. Pat. Nos. 7,588,767, 7,588,771, 7,662,398 and 7,754,221 and U.S. Patent Publication Nos. 2007/0202572, 2007/0212727, 2010/0062016, 2009/0098529, 2009/0053244, 2009/0155287, 2009/0117034, 2010/0233078, 2009/0162288, 2010/0196325, 2009/0136917, 2011/0064650; Zhang et al. (2009) Mol. Genet. Genomics, 282:417-435). A sequence of an LIVP strain is set forth in SEQ ID NO: 1 or 2.

[0351] LIVP strains in the compositions provided herein also include clonal strains that are derived from LIVP and that can be present in a virus preparation propagated from LIVP. The LIVP clonal strains have a genome that differs from the parental sequence set forth in SEQ ID NO: 1 or 2. The clonal strains provided herein exhibit greater anti-tumorigenicity and/or reduced toxicity compared to the recombinant or modified virus strain designated GLV-1h68 (having a genome set forth in SEQ ID NO: 3; see e.g. U.S. published patent Appl. No. US2012/0308484).

[0352] The LIVP and clonal strains have a sequence of nucleotides that have at least 70%, such as at least 75%, 80%, 85% or 90% sequence identity to SEQ ID NO: 1 or 2. For example, the clonal strains have a sequence of nucleotides that has at least 91%, 92%, 93%, 94%, 95%, 95%, 97%, 98%, 99%, 99.1%, 99.2%, 99.3%, 99.4%, 99.5%, 99.6%, 99.7%, 99.8%, 99.9% or 100% sequence identity to SEQ ID NO: 1 or 2. Such LIVP clonal viruses include viruses that differ in one or more open reading frames (ORF) compared to the parental LIVP strain that has a sequence of amino acids set forth in SEQ ID NO: 1 or 2. The LIVP clonal virus strains provided herein can contain a nucleotide deletion or mutation in any one or more nucleotides in any ORF compared to SEQ ID NO: 1 or 2, or can contain an addition or insertion of viral DNA compared to SEQ ID NO: 1 or 2.

[0353] LIVP strains in the combinations, compositions or methods provided herein include those that have a nucleotide sequence corresponding to nucleotides 2,256-181,114 of SEQ ID NO: 5, nucleotides 11,243-182,721 of SEQ ID NO: 6, nucleotides 6,264-181,390 of SEQ ID NO: 7, nucleotides 7,044-181,820 of SEQ ID NO: 8, nucleotides 6,674-181,409 of SEQ ID NO: 9, nucleotides 6,716-181,367 of SEQ ID NO: 10 or nucleotides 6,899-181,870 of SEQ ID NO: 11, or to a complement thereof. In some examples, the LIVP strain for use in the combinations, compositions and methods is a clonal strain of LIVP or a modified form thereof containing a sequence of nucleotides that has at least 85%, 86%, 87%, 88%, 89%, 90%, 91%, 92%, 93%, 94%, 95%, 96%, 97%, 98%, 99% or more sequence identity to a sequence of nucleotides 2,256-181,114 of SEQ ID NO: 5, nucleotides 11,243-182,721 of SEQ ID NO: 6, nucleotides 6,264-181,390 of SEQ ID NO: 7, nucleotides 7,044-181,820 of SEQ ID NO: 8, nucleotides 6,674-181,409 of SEQ ID NO: 9, nucleotides 6,716-181,367 of SEQ ID NO: 10 or nucleotides 6,899-181,870 of SEQ ID NO: 11. LIVP clonal strains provided herein generally also include terminal nucleotides corresponding to a left and/or right inverted terminal repeat (ITR).

[0354] Exemplary LIVP strains include, but are not limited to, virus strains designated LIVP 1.1.1 having a genome containing a sequence of nucleotides set forth in SEQ ID NO: 5 or a sequence of nucleotides that exhibits at least 85% sequence identity to SEQ ID NO: 5; a virus strain designated LIVP 2.1.1 having a genome containing a sequence of nucleotides set forth in SEQ ID NO: 6 or a sequence of nucleotides that exhibits at least 85% sequence identity to SEQ ID NO: 6; a virus strain designated LIVP 4.1.1 having a genome containing a sequence of nucleotides set forth in SEQ ID NO: 7 or a sequence of nucleotides that exhibits at least 85% sequence identity to SEQ ID NO: 7; a virus strain designated LIVP 5.1.1 having a genome containing a sequence of nucleotides set forth in SEQ ID NO: 8 or a sequence of nucleotides that exhibits at least 85% sequence identity to SEQ ID NO: 8; a virus strain designated LIVP 6.1.1 having a sequence of nucleotides set forth in SEQ ID NO: 9 or a sequence of nucleotide that exhibits at least 85% sequence identity to SEQ ID NO: 9; a virus strain designated LIVP 7.1.1 having a genome containing a sequence of nucleotides set forth in SEQ ID NO: 10 or a sequence of nucleotides that exhibits at least 85% sequence identity to SEQ ID NO: 10; or a virus strain designated LIVP 8.1.1 having a genome containing a sequence of nucleotides set forth in SEQ ID NO: 11 or a sequence of nucleotides that exhibits at least 85 sequence identity to SEQ ID NO: 11. For example, LIVP clonal strains include any having a genome containing a sequence of nucleotides that exhibits at least 86%, 87%, 88%, 89%, 90%, 91%, 92%, 93%, 94%, 95%, 96%, 97%, 98%, 99% or more sequence identity to any of SEQ ID NOS:5-11.

[0355] 2. Heterologous Nucleic Acid and Modified Viruses

[0356] Oncolytic viruses, such as a vaccinia virus (e.g. an LIVP virus) can be modified to express a heterologous gene product. The large genome size of poxviruses, such as the vaccinia viruses in the combinations, compositions and methods provided herein, allows large inserts of heterologous DNA and/or multiple inserts of heterologous DNA to be incorporated into the genome (Smith and Moss (1983) Gene 25(1):21-28). Oncolytic viruses, such as vaccinia viruses, e.g. an LIVP virus strain or clonal strain as set forth in any of SEQ ID NOS: 1, 2 or 5-11, can be modified by insertion of 1, 2, 3, 4, 5, 6, 7, 8, 9, 10 or more heterologous DNA molecules. Generally, the one or more heterologous DNA molecules are inserted into a non-essential region of the virus genome. For example, the one or more heterologous DNA molecules are inserted into a locus of the virus genome that is non-essential for replication in proliferating cells, such as tumor cells. Exemplary insertion sites are provided herein below and are known in the art.

[0357] In some examples, the virus can be modified to express an exogenous or heterologous gene. Exemplary exogenous gene products include proteins and RNA molecules. The modified viruses can express a therapeutic gene product, a detectable gene product (e.g. a diagnostic or reporter gene product), a gene product for manufacturing or harvesting, an antigenic gene product for antibody harvesting, or a viral gene product. Viruses also can be modified to alter attenuation of the virus, which includes any method of increasing or decreasing the transcriptional or translational load.

[0358] Exemplary therapeutic proteins that can be expressed by the viruses provided herein and used in the methods provided herein include, but are not limited to, erythropoietin (e.g., SEQ ID NO: 20), an anti-VEGF single chain antibody (e.g., SEQ ID NO: 21), a plasminogen K5 domain (e.g., SEQ ID NO: 22), a human tissue factor-αvβ3-integrin RGD fusion protein (e.g., SEQ ID NO: 23), interleukin-24 (e.g., SEQ ID NO: 24), or immune stimulators, such as SIL-6-SIL-6 receptor fusion protein (e.g., SEQ ID NO: 25).

[0359] In some examples, the viruses can be modified to express two or more gene products, such as 2, 3, 4, 5, 6, 7, 8, 9, 10 or more gene products, where any combination of the two or more gene products can be one or more detectable gene products, therapeutic gene products, gene products for manufacturing or harvesting or antigenic gene products for antibody harvesting or a viral gene product. In one example, a virus can be modified to express an anticancer gene product. In another example, a virus can be modified to express two or more gene products for detection or two or more therapeutic gene products. In some examples, one or more proteins involved in biosynthesis of a luciferase substrate can be expressed along with luciferase. When two or more exogenous genes are introduced, the genes can be regulated under the same or different regulatory sequences, and the genes can be inserted in the same or different regions of the viral genome, in a single or a plurality of genetic manipulation steps. In some examples, one gene, such as a gene encoding a detectable gene product, can be under the control of a constitutive promoter, while a second gene, such as a gene encoding a therapeutic gene product, can be under the control of an inducible promoter. Methods for inserting two or more genes in to a virus are known in the art and can be readily performed for a wide variety of viruses using a wide variety of exogenous genes, regulatory sequences, and/or other nucleic acid sequences.

[0360] The heterologous DNA can be any gene of interest, including any from the list of human genes and genetic disorders authored and edited by Dr. Victor A. McKusick and his colleagues at Johns Hopkins University and elsewhere, and developed for the World Wide Web by NCBI, the National Center for Biotechnology Information; online, Mendelian Inheritance in Man, OMIM™ Center for Medical Genetics, Johns Hopkins University (Baltimore, Md.), and National Center for Biotechnology Information, National Library of Medicine (Bethesda, Md.), 1999; and those available in public databases, such as PubMed and GenBank (see, e.g., (ncbi.nlm.nih.gov/entrez/query.fcgi?db=OMIM).

[0361] In particular, viruses provided herein can be modified to express an anti-tumor antibody, an anti-metastatic gene or metastasis suppressor genes; cell matrix degradative genes; hormones; growth factors; immune modulatory molecules, including a cytokine, such as interleukins or interferons, a chemokine, including CXC chemokines, costimulatory molecules; ribozymes; transporter protein; antibody or fragment thereof; antisense RNA; siRNA; microRNAs; protein ligands; a mitosis inhibitor protein; an antimiotic oligopeptide; an anti-cancer polypeptide; anti-cancer antibiotics; angiogenesis inhibitors; anti-angiogenic factors; tissue factors; a prodrug converting enzyme; genes for tissue regeneration and reprogramming human somatic cells to pluripotency; enzymes that modify a substrate to produce a detectable product or signal or are detectable by antibodies; a viral attenuation factors; a superantigen; proteins that can bind a contrasting agent, chromophore, or a compound of ligand that can be detected; tumor suppressors; cytotoxic protein; cytostatic protein; genes for optical imaging or detection including luciferase, a fluorescent protein such as a green fluorescent protein (GFP) or GFP-like protein, a red fluorescent protein (RFP), a far-red fluorescent protein, a near-infrared fluorescent protein, a yellow fluorescent protein (YFP), an orange fluorescent protein (OFP), a cerulean fluorescent protein (CFP), or a blue fluorescent protein (BFP), and phycobiliproteins from certain cyanobacteria and eukaryotic algae, including phycoerythrins (red) and the phycocyanins (blue); genes for PET imaging; genes for MRI imaging; or genes to alter attenuation of the viruses.

### a. Exemplary Modifications

[0362] Exemplary modified viruses, including heterologous genes for modification of viruses herein, are known in the art (see e.g. U.S. Pub. Nos. US2003-0059400, US2003-0228261, US 2005-0031643 now U.S. Pat. Nos. 7,588,767, 7,588,771 and 7,662,398, US 2008-0193373, US2009-0117034, US2009-0098529, US2009-0053244, US 2009-0155287, US2009-0081639, US 2009-0117034 and US2009-0136917; U.S. Pat. Nos. 7,588,767 and 7,763,420; and International Pub. No. WO 2005/047458, WO 2008/100292 and WO 2008/150496, WO 2009/139921). A non-limiting description of exemplary genes encoding heterologous proteins for modification of virus strains is set forth in Table 4. The sequence of the gene and encoded proteins are known to one of skill in the art from the literature.

TABLE 4
Exemplary Genes and Gene Products

```
Detectable gene products
  Optical Imaging
  Luciferase
```

```
bacterial luciferase
luciferase (from Vibrio harveyi or Vibrio fischerii)
  luxA
  luxB
  luxC
  luxD
  luxE
  luxAB
  luxCD
  luxABCDE
firefly luciferase
Renilla luciferase from Renilla reniformis
Gaussia luciferase
luciferases found among marine arthropods
luciferases that catalyze the oxidation of Cypridina (Vargula) luciferin
luciferases that catalyze the oxidation of Coleoptera luciferin
```

luciferase photoproteins

aequorin photoprotein to which luciferin is non-covalently bound

click beetle luciferase

CBG99
CBG99-mRFP1

Fusion Proteins

Ruc-GFP

Fluorescent Proteins
GFP

aequorin from Aequorea victoria
GFP from Aequorea victoria
GFP from Aequorea coerulescens
GFP from the anthozoan coelenterates Renilla reniformis and Renilla kollikeri (sea
pansies)
Emerald (Invitrogen, Carlsbad, CA)
EGFP (Clontech, Palo Alto, CA)
Azami-Green (MBL International, Woburn, MA)
Kaede (MBL International, Woburn, MA)
ZsGreen1 (Clontech, Palo Alto, CA)
CopGFP (Evrogen/Axxora, LLC, San Diego, CA)
Anthozoa reef coral
Anemonia sea anemone
Renilla sea pansy
Galaxea coral
Acropora brown coral
Trachyphyllia stony coral
Pectiniidae stony coral
GFP-like proteins

RFP

RFP from the corallimorph Discosoma (DsRed) (Matz et al. (1999) Nature
Biotechnology 17: 969-973)
Heteractis reef coral, Actinia or Entacmaea sea anemone
RFPs from Discosoma variants

mRFP1 (Wang et al. (2004) Proc. Natl. Acad. Sci. U.S.A. 101: 16745-9)
mCherry (Wang et al. (2004) PNAS USA. 101(48): 16745-9)
tdTomato (Wang et al. (2004) PNAS USA. 101(48): 16745-9)
mStrawberry (Wang et al. (2004) PNAS USA. 101(48): 16745-9)
mTangerine (Wang et al. (2004) PNAS USA. 101(48): 16745-9)
DsRed2 (Clontech, Palo Alto, CA)
DsRed-T1 (Bevis and Glick (2002) Nat. Biotechnol. 20: 83-87)
Anthomedusa J-Red (Evrogen)
Anemonia AsRed2 (Clontech, Palo Alto, CA)

far-red fluorescent protein

TurboFP635
mNeptune monomeric far-red fluorescent protein
Actinia AQ143 (Shkrob et al. (2005) Biochem J. 392(Pt 3): 649-54)
Entacmaea eqFP611 (Wiedenmann et al. (2002) PNAS USA. 99(18): 11646-51)
Discosoma variants

mPlum (Wang et al.. (2004) PNAS USA. 101(48): 16745-9)
mRasberry (Wang et al. (2004) PNAS USA. 101(48): 16745-9)
Heteractis HcRed1 and t-HcRed (Clontech, Palo Alto, CA)

IFP (infrared fluorescent protein)
near-infrared fluorescent protein
YFP

EYFP (Clontech, Palo Alto, CA)
YPet (Nguyen and Daugherty (2005) Nat Biotechnol. 23(3): 355-60)
Venus (Nagai et al. (2002) Nat. Biotechnol. 20(1): 87-90)
ZsYellow (Clontech, Palo Alto, CA)
mCitrine (Wang et al. (2004) PNAS USA. 101(48): 16745-9)

OFP

cOFP (Strategene, La Jolla, CA)
mKO (MBL International, Woburn, MA)
mOrange (Wang et al. (2004) PNAS USA. 101(48): 16745-9)

CFP

Cerulean (Rizzo (2004) Nat Biotechnol. 22(4): 445-9)
mCFP (Wang et al. (2004) PNAS USA. 101(48): 16745-9)
AmCyan1 (Clontech, Palo Alto, CA)
MiCy (MBL International, Woburn, MA)
CyPet (Nguyen and Daugherty (2005) Nat Biotechnol. 23(3): 355-60)

BFP

EBFP (Clontech, Palo Alto, CA);
phycobiliproteins from certain cyanobacteria and eukaryotic algae, phycoerythrins
(red) and the phycocyanins (blue)

R-Phycoerythrin (R-PE)
B-Phycoerythrin (B-PE)
Y-Phycoerythrin (Y-PE
C-Phycocyanin (P-PC)
R-Phycocyanin (R-PC)
Phycoerythrin 566 (PE 566)
Phycoerythrocyanin (PEC)
Allophycocyanin (APC)
frp Flavin Reductase
CBP Coelenterazine-binding protein 1
PET imaging

Cyp11B1 transcript variant 1
Cyp11B1 transcript variant 2
Cyp11B2
AlstR
PEPR-1
LAT-4 (SLC43A2)
Cyp51 transcript variant 1
Cyp51 transcript variant 2

Transporter proteins
Solute carrier transporter protein families (SLC)

SLC1 solute carrier 1 transporter protein family
SLC1A1, SLC1A2, SLC1A3, SLC1A4, SLC1A5, SLC1A6, SLC1A7
SLC2 solute carrier 2 transporter protein family
SLC2A1, SLC2A2, SLC2A3, SLC2A4, SLC2A5, SLC2A6, SLC2A7, SLC2A8,
SLC2A9, SLC2A10, SLC2A11, SLC2A12, SLC2A13, SLC2A14
SLC3 solute carrier 3 transporter protein family
SLC3A1, SLC3A2
SLC 4 solute carrier 4 transporter protein family
SLC4A1, SLC4A2, SLC4A3, SLC4A4, SLC4A5, SLC4A6, SLC4A7, SLC4A8,
SLC4A9, SLC4A10, SLC4A11
SLC5 solute carrier 5 transporter protein family
SLC5A1 sodium/glucose cotransporter 1
SLC5A2 sodium/glucose cotransporter 2
SLC5A3 sodium/myo-inositol cotransporter
SLC5A4 low affinity sodium-glucose cotransporter
SLC5A5 sodium/iodide cotransporter
SLC5A6 sodium-dependent multivitamin transporter
SLC5A7 high affinity choline transporter 1
SLC5A8 sodium-coupled monocarboxylate transporter 1
SLC5A9 sodium/glucose cotransporter 4
SLC5A10 sodium/glucose cotransporter 5, isoform 1
sodium/glucose cotransporter 5, isoform 2
sodium/glucose cotransporter 5, isoform 3
sodium/glucose cotransporter 5, isoform 4
SLC5A11 sodium/myo-inositol cotransporter 2, isoform 1
sodium/myo-inositol cotransporter 2, isoform 2
sodium/myo-inositol cotransporter 2, isoform 3
sodium/myo-inositol cotransporter 2, isoform 4
SLC5A12 sodium-coupled monocarboxylate transporter 2, isoform 1
sodium-coupled monocarboxylate transporter 2, isoform 2

Sodium Iodide Symporter (NIS)
hNIS (NM_000453)
hNIS (BC105049)
hNIS (BC105047)
hNIS (non-functional hNIS variant containing an additional 11 aa)

SLC6 solute carrier 6 transporter protein family
SLC6A1 sodium- and chloride-dependent GABA transporter 1
SLC6A2 norepinephrine transporter (sodium-dependent noradrenaline transporter)
SLC6A3 sodium-dependent dopamine transporter
SLC6A4 sodium-dependent serotonin transporter
SLC6A5 sodium- and chloride-dependent glycine transporter 1
SLC6A6 sodium-and chloride-dependent taurine transporter
SLC6A7 sodium-dependent proline transporter
SLC6A8 sodium- and chloride-dependent creatine transporter
SLC6A9 sodium- and chloride-dependent glycine transporter 1, isoform 1
sodium- and chloride-dependent glycine transporter 1, isoform 2
sodium- and chloride-dependent glycine transporter 1, isoform 3
SLC6A10 sodium- and chloride-dependent creatine transporter 2
SLC6A11 sodium- and chloride-dependent GABA transporter 3
SLC6A12 sodium- and chloride-dependent betaine transporter
SLC6A13 sodium- and chloride-dependent GABA transporter 2
SLC6A14 Sodium- and chloride-dependent neutral and basic amino acid transporter
B(0+)
SLC6A15 Orphan sodium- and chloride-dependent neurotransmitter transporter
NTT73
SLC6A16 Orphan sodium- and chloride-dependent neurotransmitter transporter
NTT5
SLC6A17 Orphan sodium- and chloride-dependent neurotransmitter transporter
NTT4
Sodium SLC6A18 Sodium- and chloride-dependent transporter XTRP2
SLC6A19 Sodium-dependent neutral amino acid transporter B(0)
SLC6A20 Sodium- and chloride-dependent transporter XTRP3
Norepinephrine Transporter (NET)

Human Net (hNET) transcript variant 1 (NM_001172504)
Human Net (hNET) transcript variant 2 (NM_001172501)
Human Net (hNET) transcript variant 3 (NM_001043)
Human Net (hNET) transcript variant 4 (NM_001172502)
Non-Human Net

SLC7 solute carrier 7 transporter protein family
SLC7A1, SLC7A2, SLC7A3, SLC7A4, SLC7A5, SLC7A6, SLC7A7, SLC7A8,
SLC7A9, SLC7A10, SLC7A11, SLC7A13, SLC7A14
SLC8 solute carrier 8 transporter protein family
SLC8A1, SLC8A2, SLC8A3
SLC9 solute carrier 9 transporter protein family
SLC9A1, SLC9A2, SLC9A3, SLC9A4, SLC9A5, SLC9A6, SLC9A7, SLC9A8,
SLC9A9, SLC9A10, SLC9A11
SLC10 solute carrier 10 transporter protein family
SLC10A1, SLC10A2, SLC10A3, SLC10A4, SLC10A5, SLC10A6, SLC10A7
SLC11 solute carrier 11 transporter protein family
SLC11A1
SCL11A2 or hDMT

SLC11A2 transcript variant 4
SLC11A2 transcript variant 1
SLC11A2 transcript variant 2
SLC11A2 transcript variant 3
SLC11A2 transcript variant 5
SLC11A2 transcript variant 6
SLC11A2 transcript variant 7

SLC12 solute carrier 12 transporter protein family
SLC12A1, SLC12A1, SLC12A2, SLC12A3, SLC12A4, SLC12A5, SLC12A6,
SLC12A7, SLC12A8, SLC12A9
SLC13 solute carrier 13 transporter protein family
SLC13A1, SLC13A2, SLC13A3, SLC13A4, SLC13A5
SLC14 solute carrier 14 transporter protein family
SLC14A1, SLC14A2
SLC15 solute carrier 15 transporter protein family
SLC15A1, SLC15A2, SLC15A3, SLC15A4
SLC16 solute carrier 16 transporter protein family
SLC16A1, SLC16A2, SLC16A3, SLC16A4, SLC16A5, SLC16A6, SLC16A7,
SLC16A8, SLC16A9, SLC16A10, SLC16A11, SLC16A12, SLC16A13,
SLC16A14
SLC17 solute carrier 17 transporter protein family
SLC17A1, SLC17A2, SLC17A3, SLC17A4, SLC17A5, SLC17A6, SLC17A7,
SLC17A8
SLC18 solute carrier 18 transporter protein family
SLC18A1, SLC18A2, SLC18A3
SLC19 solute carrier 19 transporter protein family
SLC19A1, SLC19A2, SLC19A3
SLC20 solute carrier 20 transporter protein family
SLC20A1, SLC20A2
SLC21 solute carrier 21 transporter protein family

subfamily 1; SLCO1A2, SLCO1B1, SLCO1B3, SLCO1B4,
SLCO1C1
subfamily 2; SLCO2A1, SLCO2B1
subfamily 3; SLCO3A1
subfamily 4; SLCO4A1, SLCO4C1
subfamily 5; SLCO5A1

SLC22 solute carrier 22 transporter protein family
SLC22A1, SLC22A2, SLC22A3, SLC22A4, SLC22A5, SLC22A6, SLC22A7,
SLC22A8, SLC22A9, SLC22A10, SLC22A11, SLC22A12, SLC22A13,
SLC22A14, SLC22A15, SLC22A16, SLC22A17, SLC22A18, SLC22A19,
SLC22A20
SLC23 solute carrier 23 transporter protein family
SLC23A1, SLC23A2, SLC23A3, SLC23A4
SLC24 solute carrier 24 transporter protein family
SLC24A1, SLC24A2, SLC24A3, SLC24A4, SLC24A5, SLC24A6
SLC25 solute carrier 25 transporter protein family
SLC25A1, SLC25A2, SLC25A3, SLC25A4, SLC25A5, SLC25A6, SLC25A7,
SLC25A8, SLC25A9, SLC25A10, SLC25A11, SLC25A12, SLC25A13,
SLC25A14, SLC25A15, SLC25A16, SLC25A17, SLC25A18, SLC25A19,
SLC25A20, SLC25A21, SLC25A22, SLC25A23, SLC25A24, SLC25A25,
SLC25A26, SLC25A27, SLC25A28, SLC25A29, SLC25A30, SLC25A31,
SLC25A32, SLC25A33, SLC25A34, SLC25A35, SLC25A36, SLC25A37,
SLC25A38, SLC25A39, SLC25A40, SLC25A41, SLC25A42, SLC25A43,
SLC25A44, SLC25A45, SLC25A46
SLC26 solute carrier 26 transporter protein family
SLC26A1, SLC26A2, SLC26A3, SLC26A4, SLC26A5, SLC26A6, SLC26A7,
SLC26A8, SLC26A9, SLC26A10, SLC26A11
SLC27 solute carrier 27 transporter protein family
SLC27A1, SLC27A2, SLC27A3, SLC27A4, SLC27A5, SLC27A6
SLC28 solute carrier 28 transporter protein family
SLC28A1, SLC28A2, SLC28A3
SLC29 solute carrier 29 transporter protein family
SLC29A1, SLC29A2, SLC29A3, SLC29A4
SLC30 solute carrier 30 transporter protein family
SLC30A1, SLC30A2, SLC30A3, SLC30A4, SLC30A5, SLC30A6, SLC30A7,
SLC30A8, SLC30A9, SLC30A10
SLC31 solute carrier 31 transporter protein family
SLC31A1
SLC32 solute carrier 32 transporter protein family
SLC32A1
SLC33 solute carrier 33 transporter protein family
SLC33A1
SLC34 solute carrier 34 transporter protein family
SLC34A1, SLC34A2, SLC34A3
SLC35 solute carrier 35 transporter protein family

subfamily A; SLC35A1, SLC35A2, SLC35A3, SLC35A4, SLC35A5
subfamily B; SLC35B1, SLC35B2, SLC35B3, SLC35B4
subfamily C; SLC35C1, SLC35C2
subfamily D; SLC35D1, SLC35D2, SLC35D3
subfamily E; SLC35E1, SLC35E2, SLC35E3, SLC35E4

SLC36 solute carrier 36 transporter protein family
SLC36A1, SLC36A2, SLC36A3, SLC36A4
SLC37 solute carrier 37 transporter protein family
SLC37A1, SLC37A2, SLC37A3, SLC37A4
SLC38 solute carrier 38 transporter protein family
SLC38A1, SLC38A2, SLC38A3, SLC38A4, SLC38A5, SLC38A6
SLC39 solute carrier 39 transporter protein family
SLC39A1, SLC39A2, SLC39A3, SLC39A4, SLC39A5, SLC39A6, SLC39A7,
SLC39A8, SLC39A9, SLC39A10, SLC39A11, SLC39A12, SLC39A13,
SLC39A14
SLC40 solute carrier 40 transporter protein family
SLC40A1
SLC41 solute carrier 41 transporter protein family
SLC41A1, SLC41A2, SLC41A3
SLC42 solute carrier 42 transporter protein family
RHAG, RhBG, RhCG
SLC43 solute carrier 43 transporter protein family
SLC43A1
SLC43A2
SLC43A3
SLC44 solute carrier 44 transporter protein family
SLC44A1, SLC44A2, SLC44A3, SLC44A4, SLC44A5
SLC45 solute carrier 45 transporter protein family
SLC45A1, SLC45A2, SLC54A3, SLC45A4
SLC46 solute carrier 46 transporter protein family
SLC46A1, SLC46A2
SLC47 solute carrier 47 transporter protein family
SLC47A1, SLC47A2

MRI Imaging

Human transferrin receptor
Mouse transferrin receptor
Human ferritin light chain (FTL)
Human ferritin heavy chain
FTL 498-199InsTC, a mutated form of the ferritin light chain
Bacterial ferritin

E. coli
E. coli strain K12
S. aureus strain MRSA252
S. aureus strain NCTC 8325
H. pylori B8

bacterioferritin
codon optimized bacterioferritin
MagA

Enzymes that modify a substrate to produce a detectable product or signal, or are
detectable by antibodies

alpha-amylase
alkaline phosphatase
secreted alkaline phosphatase
peroxidase
T4 lysozyme
oxidoreductase
pyrophosphatase

Therapeutic genes
therapeutic gene product
antigens

tumor specific antigens
tumor-associated antigens
tissue-specific antigens
bacterial antigens
viral antigens
yeast antigens
fungal antigens
protozoan antigens
parasite antigens
mitogens

an antibody or fragment thereof

virus-specific antibodies

antisense RNA
siRNA

siRNA directed against expression of a tumor-promoting gene

an oncogene
growth factor
angiogenesis promoting gene
a receptor

siRNA molecule directed against expression of any gene essential for cell growth,
cell replication or cell survival.
siRNA molecule directed against expression of any gene that stabilizes the cell
membrane or otherwise limits the number of tumor cell antigens released from the
tumor cell.

protein ligands
an antitumor oligopeptide
an antimitotic peptide

tubulysin,
phomopsin
hemiasterlin
taltobulin (HTI-286, 3)
cryptophycin

a mitosis inhibitor protein
an antimitotic oligopeptide
an anti-cancer polypeptide antibiotic
anti-cancer antibiotics

tissue factors

Tissue Factor (TF)
αvβ3-integrin RGD fusion protein

Immune modulatory molecules

GM-CSF
MCP-1 or CCL2 (Monocyte Chemoattractant Protein-1) Human
MCP-1 murine
IP-10 or Chemokine ligand 10 (CXCL10)
LIGHT
P60 or SEQSTM1 (Sequestosome 1 transcript variant 1)
P60 or SEQSTM1 (Sequestosome 1 transcript variant 3)
P60 or SEQSTM1 (Sequestosome 1 transcript variant 2)
OspF
OspG
STAT1alpha
STAT1beta

Interleukins

IL-18 (Interleukin-18)
IL-11 (Interleukin-11)
IL-6 (Interleukin-6)
sIL-6R-IL-6
interleukin-12
interleukin-1
interleukin-2
IL-24 (Interleukin-24)
IL-24 transcript variant 1
IL-24 transcript variant 4
IL-24 transcript variant 5
IL-4
IL-8
IL-10

chemokines

IP-10 (CXCL)
Thrombopoietin
members of the C-X-C and C-C chemokine families
RANTES
MIP1-alpha
MIP1-beta
MIP-2

CXC chemokines

GROα
GROβ (MIP-2)
GROγ
ENA-78
LDGF-PPBP
GCP-2
PF4
Mig
IP-10
SDF-1α/β
BUNZO/STRC33
I-TAC
BLC/BCA-1
MDC
TECK
TARC
HCC-1
HCC-4
DC-CK1
MIP-3α
MIP-3β
MCP-2
MCP-3 (Monocyte Chemoattractant Protein-3, CCL7)
MCP-4
MCP-5 (Monocyte Chemoattractant Protein-5; CCL12)
Eotaxin (CCL11)
Eotaxin-2/MPIF-2
I-309
MIP-5/HCC-2
MPIF-1
6Ckine
CTACK
MEC
lymphotactin
fractalkine

Immunoglobulin superfamily of cytokines

B7.1
B7.2

Anti-angiogenic genes/angiogenesis inhibitors

Human plasminogen k5 domain (hK5)
PEDF (SERPINF1) (Human)
PEDF (mouse)
anti-VEGF single chain antibody (G6)
anti-DLL4 s.c. antibody GLAF-3
tTF-RGD (truncated human tissue factor protein fused to an RGD peptide)

viral attenuation factors

Interferons

IFN-γ
IFN-α
IFN-β

Antibody or scFv

Therapeutic antibodies (i.e. anticancer antibodies)

Rituximab (RITUXAN)
ADEPT
Trastuzumab (Herceptin)
Tositumomab (Bexxar)
Cetuximab (Erbitux)
Ibritumomab (90Y-Ibritumomab tiuexetan; Zevalin)
Alemtuzumab (Campath-1H)
Epratuzumab (Lymphocide)
Gemtuzumab ozogamicin (Mylotarg)
Bevacimab (Avastin) and Edrecolomab (Panorex)
Infliximab

Metastasis suppressor genes

NM23 or NME1 Isoform a
NM23 or NME1 Isoform b

Anti-metastatic genes

E-Cad
Gelsolin
LKB1 (STK11)
RASSF1
RASSF2
RASSF3
RASSF4
RASSF5
RASSF6
RASSF7
RASSF8
Syk
TIMP-1 (Tissue Inhibitor of Metalloproteinase Type-1)
TIMP-2 (Tissue Inhibitor of Metalloproteinase Type-2)
TIMP-3 (Tissue Inhibitor of Metalloproteinase Type-3)
TIMP-4 (Tissue Inhibitor of Metalloproteinase Type-4)
BRMS-1
CRMP-1
CRSP3
CTGF
DRG1
KAI1
KiSS1 (kisspeptin)
kisspeptin fragments

kisspeptin-10
kisspeptin-13
kisspeptin-14
kisspeptin-54

Mkk4
Mkk6
Mkk7
RKIP
RHOGDI2
SSECKS
TXNIP/VDUP1

Cell matrix-degradative genes

Relaxin 1
hMMP9

Hormones

Human Erythropoietin (EPO)

MicroRNAs

pre-miRNA 181a (sequence inserted into viral genome)
miRNA 181a
mmu-miR-181a MIMAT0000210 mature miRNA 181a
pre-miRNA 126 (sequence inserted into the vial genome)
miRNA 126
hsa-miR-126 MI000471
hsa-miR-126 MIMAT0000445
pre-miRNA 335 (sequence inserted into the viral genome)
miRNA 335
hsa-miR-335 MI0000816
hsa-miR-335 MIMAT0000765

Genes for tissue regeneration and reprogramming Human somatic cells to pluripotency

nAG
Oct4
NANOG
Ngn (Neogenin 1) transcript variant 1
Ngn (Neogenin 1) transcript variant 2
Ngn (Neogenin 1) transcript variant 3
Ngn3
Pdx1
Mafa

Additional Genes

Myc-CTR1
FCU1
mMnSOD
HACE1
nppa1
GCP-2 (Granulocyte Chemotactic Protein-2, CXCL6)
hADH
Wildtype CDC6
Mut CDC6
GLAF-3 anti-DLL4 scFv
GLAF-4 anti-FAP (Fibroblast Activation Protein) scFv (Brocks et al., (2001) Mol.
Medicine 7(7): 461-469)
GLAF-5 anti-FAP scFv
BMP4
wildtype F14.5L

Other Proteins

WT1
p53
pseudomonas A endotoxin
diphtheria toxin
Arf or p16
Bax
Herpes simplex virus thymidine kinase
E. coli purine nucleoside phosphorylase
angiostatin
endostatin
Rb
BRCA1
cystic fibrosis transmembrane regulator (CFTR)
Factor VIII
low density lipoprotein receptor
alpha-galactosidase
beta-glucocerebrosidase
insulin
parathyroid hormone
alpha-1-antitrypsin
rsCD40L
Fas-ligand
TRAIL
TNF
microcin E492
xanthineguanine phosphoribosyltransferase (XGPRT)
E. coli guanine phosphoribosyltransferase (gpt)
hyperforin
endothelin-1 (ET-1)
connective tissue growth factor (CTGF)
vascular endothelial growth factor (VEGF)
cyclooxygenase
COX-2
cyclooxygenase-2 inhibitor
MPO (Myeloperoxidase)
Apo A1 (Apolipoprotein A1)
CRP (C Reactive Protein)
Fibrinogen
SAP (Serum Amyloid P)
FGF-basic (Fibroblast Growth Factor-basic)
PPAR-agonist
PE37/TGF-alpha fusion protein

Replacement of the A34R gene with another A34R gene from a different strain in order
to increase the EEV form of the virus

A34R from VACV IHD-J
A34R with a mutation at codon 151 (Lys 151 to Asp)
A34R with a mutation at codon 151 (Lys 151 to Glu)

Non-coding Sequence

Non-proteins
Non-coding nucleic acid

Ribozymes

Group I introns
Group II introns
RNaseP
hairpin ribozymes
hammerhead ribozymes

Prodrug converting enzymes

varicella zoster thymidine kinase
cytosine deaminase
purine nucleoside phosphorylase (e.g., from E. coli)
beta lactamase
carboxypeptidase G2
carboxypeptidase A
cytochrome P450

cytochrome P450-2B1
cytochrome P450-4B1

horseradish peroxidase
nitroreductase
rabbit carboxylesterase
mushroom tyrosinase
beta galactosidase (lacZ) (i.e., from E. coli)
beta glucuronidase (gusA)
thymidine phosphorylase
deoxycytidine kinase
linamerase

Proteins detectable by antibodies

chloramphenicol acetyl transferase
hGH

Viral attenuation factors

virus-specific antibodies

mucins
thrombospondin

tumor necrosis factors (TNFs)

TNFα

Superantigens
Toxins

diphtheria toxin
Pseudomonas exotoxin
Escherichia coli Shiga toxin
Shigella toxin
Escherichia coli Verotoxin 1
Toxic Shock Syndrome Toxin 1
Exfoliating Toxins (EXft)
Streptococcal Pyrogenic Exotoxin (SPE) A, B and C
Clostridial Perfringens Enterotoxin (CPET)
staphylococcal enterotoxins

SEA, SEB, SEC1, SEC2, SED, SEE and SEH

Mouse Mammary Tumor Virus proteins (MMTV)
Streptococcal M proteins
Listeria monocytogenes antigen p60
mycoplasma arthritis superantigens

Proteins that can bind a contrasting agent, chromophore, or a compound or ligand that
can be detected

siderophores

enterobactin
salmochelin
yersiniabactin
aerobactin

Growth Factors

platelet-derived growth factor (PDG-F)
keratinocyte growth factor (KGF)
insulin-like growth factor-1 (IGF-1)
insulin-like growth factor-binding proteins (IGFBPs)
transforming growth factor (TGF-alpha)
Growth factors for blood cells

Granulocyte Colony Stimulating Factor (G-CSF)

growth factors that can boost platelets

Other Groups

BAC (Bacterial Artificial Chromosome) encoding several or all proteins of a

specific pathway, e.g. woundhealing-pathway

MAC (Mammalian Artificial Chromosome) encoding several or all proteins of a

specific pathway, e.g. woundhealing-pathway

tumor antigen
RNAi
ligand binding proteins
proteins that can induce a signal detectable by MRI
angiogenins
photosensitizing agents
anti-metabolites
signaling modulators
chemotherapeutic compounds
lipases
proteases
pro-apoptotic factors
anti-cancer vaccine

antigen vaccines
whole cell vaccines (i.e., dendritic cell vaccines)
DNA vaccines
anti-idiotype vaccines

tumor suppressors
cytotoxic protein
cytostatic proteins
costimulatory molecules

cytokines and chemokines

cancer growth inhibitors
gene therapy
BCG vaccine for bladder cancer

Proteins that interact with host cell proteins

### b. Control of Heterologous Gene Expression

[0363] In some examples, the heterologous nucleic acid also can contain one or more regulatory sequences to regulate expression of an open reading frame encoding the heterologous RNA and/or protein. Suitable regulatory sequences which, for example, are functional in a mammalian host cell are well known in the art. Expression can also be influenced by one or more proteins or RNA molecules expressed by the virus. Gene regulatory elements, such as promoters and enhancers, possess cell type specific activities and can be activated by certain induction factors (e.g., hormones, growth factors, cytokines, cytostatic agents, irradiation, heat shock) via responsive elements. A controlled and restricted expression of these genes can be achieved using such regulatory elements as internal promoters to drive the expression of therapeutic genes in viral vector constructs.

[0364] For example, the one or more heterologous nucleic acid molecules can be operably linked to a promoter for expression of the heterologous RNA and/or protein. For example, a heterologous nucleic acid that is operably linked to a promoter is also called an expression cassette. Hence, viruses provided herein can have the ability to express one or more heterologous genes. Gene expression can include expression of a protein encoded by a gene and/or expression of an RNA molecule encoded by a gene. In some embodiments, the viruses provided herein can express exogenous genes at levels high enough that permit harvesting products of the exogenous genes from the tumor. Expression of heterologous genes can be controlled by a constitutive promoter, or by an inducible promoter. In other examples, organ or tissue-specific expression can be controlled by regulatory sequences. In order to achieve expression only in the target organ, for example, a tumor to be treated, the foreign nucleotide sequence can be linked to a tissue specific promoter and used for gene therapy. Such promoters are well known to those skilled in the art (see, e.g., Zimmermann et al., Neuron 12: 11-24 (1994); Vidal et al., EMBO J. 9: 833-840 (1990); Mayford et al., Cell 81: 891-904 (1995); and Pinkert et al., Genes & Dev. 1: 268-76 (1987)).

[0365] Exemplary promoters for the expression of heterologous genes are known in the art. The heterologous nucleic acid can be operatively linked to a native promoter or a heterologous promoter that is not native to the virus. Any suitable promoters, including synthetic and naturally-occurring and modified promoters, can be used. Exemplary promoters include synthetic promoters, including synthetic viral and animal promoters. Native promoter or heterologous promoters include, but are not limited to, viral promoters, such as vaccinia virus and adenovirus promoters.

[0366] In one example, the promoter is a poxvirus promoter, such as, for example, a vaccinia virus promoter. Vaccinia viral promoters for the expression of one or more heterologous genes can be synthetic or natural promoters, and include vaccinia early, intermediate, early/late and late promoters. Exemplary vaccinia viral promoters for controlling heterologous gene expression include, but are not limited to, P_{7.5k}, P₁₁ₖ, P_{SE}, P_{SEL}, P_{SL}, HSR, TK, P28, C11R, G8R, F17R, I3L, I8R, A1L, A2L, A3L, H1L, H3L, H5L, H6R, H8R, D1R, D4R, D5R, D9R, D11L, D12L, D13L, M1L, N2L, P4b or K1 promoters. Other viral promoters include, but are not limited to, adenovirus late promoter, Cowpox ATI promoter, or T7 promoter. Strong late promoters can be used to achieve high levels of expression of the heterologous genes. Early and intermediate-stage promoters also can be used. In one example, the promoters contain early and late promoter elements, for example, the vaccinia virus early/late promoter P_{7.5k}, vaccinia late promoter P₁₁ₖ, a synthetic early/late vaccinia P_{SEL} promoter (Patel et al., (1988) Proc. Natl. Acad. Sci. USA 85: 9431-9435; Davison and Moss, (1989) J Mol Biol 210: 749-769; Davison et al. (1990) Nucleic Acids Res. 18: 4285-4286; Chakrabarti et al. (1997), BioTechniques 23: 1094-1097). The viruses provided herein can exhibit differences in characteristics, such as attenuation, as a result of using a stronger promoter versus a weaker promoter. For example, in vaccinia, synthetic early/late and late promoters are relatively strong promoters, whereas vaccinia synthetic early, P_{7.5k} early/late, P_{7.5k} early, and P₂₈ late promoters are relatively weaker promoters (see e.g., Chakrabarti et al. (1997) BioTechniques 23(6) 1094-1097). Combinations of different promoters can be used to express different gene products in the same virus or two different viruses.

[0367] As is known in the art, regulatory sequences can permit constitutive expression of the exogenous gene or can permit inducible expression of the exogenous gene. Further, the regulatory sequence can permit control of the level of expression of the exogenous gene. In some examples, such as gene product manufacture and harvesting, the regulatory sequence can result in constitutive, high levels of gene expression. In some examples, such as anti-(gene product) antibody harvesting, the regulatory sequence can result in constitutive, lower levels of gene expression. In tumor therapy examples, a therapeutic protein can be under the control of an internally inducible promoter or an externally inducible promoter.

[0368] Hence, expression of heterologous genes can be controlled by a constitutive promoter or by an inducible promoter. Inducible promoters can be used to provide tissue specific expression of the heterologous gene or can be inducible by the addition of a regulatory molecule to provide temporal specific induction of the promoter. In some examples, inducible expression can be under the control of cellular or other factors present in a tumor cell or present in a virus-infected tumor cell. In further examples, inducible expression can be under the control of an administrable substance, including IPTG, RU486 or other known induction compounds. Additional regulatory sequences can be used to control the expression of the one or more heterologous genes inserted the virus. Any of a variety of regulatory sequences are available to one skilled in the art according to known factors and design preferences.

### c. Exemplary Modified or Recombinant Viruses

[0369] Exemplary modified or recombinant vaccinia viruses for use in the combinations, compositions or methods herein are those derived from the Lister strain, and in particular the attenuated Lister strain LIVP. Recombinant LIVP viruses containing heterologous nucleic acid have been generated and are known in the art. The modified LIVP viruses can be modified by insertion, deletion or amino acid replacement of heterologous nucleic acid compared to an LIVP strain having a genome set forth in any one of SEQ ID NOS: 1, 2 or 5-11, or having a genome that exhibits at least 85% or more sequence identity to any of SEQ ID NOS: 1, 2 or 5-11. Table 5 sets forth exemplary viruses, the reference or parental LIVP (e.g. LIVP set forth in SEQ ID NO: 2 or GLV-1h68 set forth in SEQ ID NO: 3) and the resulting genotype. The exemplary modifications of the Lister strain can be adapted to other vaccinia viruses (e.g., Western Reserve (WR), Copenhagen, Tashkent, Tian Tan, Lister, Wyeth, IHD-J, and IHD-W, Brighton, Ankara, MVA, Dairen I, LIPV, LC16M8, LC16MO, LIVP, WR 65-16, Connaught, New York City Board of Health).

TABLE 5
Recombinant Viruses

| Virus | Parent | Genotype | | | | |
|---|---|---|---|---|---|---|
| Name | Virus | F14.5L | J2R | A56R | A34R | A35R |
| GLV- | LIVP | (PSE/L)Ruc- | (PSE/L)rTrfR- | (P11)gusA | wt | wt |
| 1h68 | | GFP | (P7.5)lacZ | | | |
| GLV- | GLV-1h68 | (PSE/L)Ruc- | (PSE/L)rTrfR- | (P11)gusA | A34R | wt |
| 1i69 | | GFP | (P7.5)lacZ | | from | |
| | | | | | IHD-J | |
| GLV- | GLV-1h68 | (PSE/L)Ruc- | (PSE/L)rTrfR- | ko | wt | wt |
| 1h70 | | GFP | (P7.5)lacZ | | | |
| GLV- | GLV-1h68 | ko | (PSE/L)rTrfR- | (P11)gusA | wt | wt |
| 1h71 | | | (P7.5)lacZ | | | |
| GLV- | GLV-1h68 | (PSE/L)Ruc- | ko | (P11)gusA | wt | wt |
| 1h72 | | GFP | | | | |
| GLV- | GLV-1h70 | ko | (PSE/L)rTrfR- | ko | wt | wt |
| 1h73 | | | (P7.5)lacZ | | | |
| GLV- | GLV-1h73 | ko | ko | ko | wt | wt |
| 1h74 | | | | | | |
| GLV- | GLV-1h68 | (PSE/L)Ruc- | (PSE)GM-CSF | (P11)gusA | wt | wt |
| 1h76 | | GFP | | | | |
| GLV- | GLV-1h68 | (PSE/L)Ruc- | (PSE/L)GM-CSF | (P11)gusA | wt | wt |
| 1h77 | | GFP | | | | |
| GLV- | GLV-1h68 | (PSE/L)Ruc- | (PSL)GM-CSF | (P11)gusA | wt | wt |
| 1h78 | | GFP | | | | |
| GLV- | GLV-1h68 | (PSE/L)Ruc- | (PSE/L)mMCP-1 | (P11)gusA | wt | wt |
| 1h79 | | GFP | | | | |
| GLV- | GLV-1h68 | (PSE/L)Ruc- | (PSL)mMCP-1 | (P11)gusA | wt | wt |
| 1h80 | | GFP | | | | |
| GLV- | GLV-1h68 | (PSE/L)Ruc- | (PSE/L)rTrfR- | (PSE/L)hk5 | wt | wt |
| 1h81 | | GFP | (P7.5)lacZ | | | |
| GLV- | GLV-1h22 | (PSE/L)Ruc- | (PSE/L)TrfR- | (PSE/L)ftn | wt | wt |
| 1h82 | | GFP | (P7.5)lacZ | | | |
| GLV- | GLV-1h68 | (PSE/L)Ruc- | (PSE/L)rTrfR- | (PSE/L)ftn | wt | wt |
| 1h83 | | GFP | (P7.5)lacZ | | | |
| GLV- | GLV-1h68 | ko | (PSE/L)CBG99- | ko | wt | wt |
| 1h84 | | | mRFP1 | | | |
| GLV- | GLV-1h72 | ko | ko | (P11)gusA | wt | wt |
| 1h85 | | | | | | |
| GLV- | GLV-1h72 | (PSE/L)Ruc- | ko | ko | wt | wt |
| 1h86 | | GFP | | | | |
| GLV- | GLV-1h68 | (PSE/L)Ruc- | (PSE/L)rTrfR- | (P11)gusA | wt | ko |
| 1j87 | | GFP | (P7.5)lacZ | | | |
| GLV- | GLV-1h73 | ko | (PSE/L)rTrfR- | ko | wt | ko |
| 1j88 | | | (P7.5)lacZ | | | |
| GLV- | GLV-1h74 | ko | ko | ko | wt | ko |
| 1j89 | | | | | | |
| GLV- | GLV-1h68 | (PSE/L)Ruc- | (PSE/L)rTrfR- | (PSE)sIL- | wt | wt |
| 1h90 | | GFP | (P7.5)lacZ | 6R/IL-6 | | |
| GLV- | GLV-1h68 | (PSE/L)Ruc- | (PSE/L)rTrfR- | (PSE/L)sIL- | wt | wt |
| 1h91 | | GFP | (P7.5)lacZ | 6R/IL-6 | | |
| GLV- | GLV-1h68 | (PSE/L)Ruc- | (PSE/L)rTrfR- | (PSL)sIL- | wt | wt |
| 1h92 | | GFP | (P7.5)lacZ | 6R/IL-6 | | |
| GLV- | GLV-1h68 | (PSE/L)Ruc- | (PSE/L)rTrfR- | (PSE)FCU1 | wt | wt |
| 1h93 | | GFP | (P7.5)lacZ | | | |
| GLV- | GLV-1h68 | (PSE/L)Ruc- | (PSE/L)rTrfR- | (PSEL)FCU1 | wt | wt |
| 1h94 | | GFP | (P7.5)lacZ | | | |
| GLV- | GLV-1h68 | (PSE/L)Ruc- | (PSE/L)rTrfR- | (PSL)FCU1 | wt | wt |
| 1h95 | | GFP | (P7.5)lacZ | | | |
| GLV- | GLV-1h68 | (PSE)IL-24 | (PSE/L)rTrfR- | (P11)gusA | wt | wt |
| 1h96 | | | (P7.5)lacZ | | | |
| GLV- | GLV-1h68 | (PSEL)IL-24 | (PSE/L)rTrfR- | (P11)gusA | wt | wt |
| 1h97 | | | (P7.5)lacZ | | | |
| GLV- | GLV-1h68 | (PSL)IL-24 | (PSE/L)rTrfR- | (P11)gusA | wt | wt |
| 1h98 | | | (P7.5)lacZ | | | |
| GLV- | GLV-1h68 | (PSE)hNET | (PSE/L)rTrfR- | (P11)gusA | wt | wt |
| 1h99 | | | (P7.5)lacZ | | | |
| GLV- | GLV-1h68 | (PSE/L)Ruc- | (PSE)hNET | (P11)gusA | wt | wt |
| 1h100 | | GFP | | | | |
| GLV- | GLV-1h68 | (PSE/L)Ruc- | (PSL)hNET | (P11)gusA | wt | wt |
| 1h101 | | GFP | | | | |
| GLV- | GLV-1h68 | (PSE/L)Ruc- | (PSE/L)rTrfR- | (PSE)hDMT | wt | wt |
| 1h102 | | GFP | (P7.5)lacZ | | | |
| GLV- | GLV-1h68 | (PSE/L)Ruc- | (PSL)hMCP1 | (P11)gusA | wt | wt |
| 1h103 | | GFP | | | | |
| GLV- | GLV-1h68 | (PSE/L)Ruc- | (PSE)tTF-RGD | (P11)gusA | wt | wt |
| 1h104 | | GFP | | | | |
| GLV- | GLV-1h68 | (PSE/L)Ruc- | (PSE/L)tTF-RGD | (P11)gusA | wt | wt |
| 1h105 | | GFP | | | | |
| GLV- | GLV-1h68 | (PSE/L)Ruc- | (PSL)tTF-RGD | (P11)gusA | wt | wt |
| 1h106 | | GFP | | | | |
| GLV- | GLV-1h68 | (PSE/L)Ruc- | (PSE)G6-FLAG | (P11)gusA | wt | wt |
| 1h107 | | GFP | | | | |
| GLV- | GLV-1h68 | (PSE/L)Ruc- | (PSE/L)G6- | (P11)gusA | wt | wt |
| 1h108 | | GFP | FLAG | | | |
| GLV- | GLV-1h68 | (PSE/L)Ruc- | (PSL)G6-FLAG | (P11)gusA | wt | wt |
| 1h109 | | GFP | | | | |
| GLV- | GLV-1h68 | (PSE/L)Ruc- | (PSE/L)rTrfR- | (PSE)bfr | wt | wt |
| 1h110 | | GFP | (P7.5)lacZ | | | |
| GLV- | GLV-1h68 | (PSE/L)Ruc- | (PSE/L)rTrfR- | (PSE/L)bfr | wt | wt |
| 1h111 | | GFP | (P7.5)lacZ | | | |
| GLV- | GLV-1h68 | (PSE/L)Ruc- | (PSE/L)rTrfR- | (PSL)bfr | wt | wt |
| 1h112 | | GFP | (P7.5)lacZ | | | |
| GLV- | GLV-1h68 | (PSE/L)Ruc- | (PSE/L)rTrfR- | (PSE/L)bfrₒₚₜ | wt | wt |
| 1h113 | | GFP | (P7.5)lacZ | | | |
| GLV- | GLV-1h68 | (PSE/L)Ruc- | (PSE/L)rTrfR- | (PSE)mtr | wt | wt |
| 1h114 | | GFP | (P7.5)lacZ | | | |
| GLV- | GLV-1h68 | (PSE/L)Ruc- | (PSE/L)rTrfR- | (PSE/L)mtr | wt | wt |
| 1h115 | | GFP | (P7.5)lacZ | | | |
| GLV- | GLV-1h68 | (PSE/L)Ruc- | (PSE)mMnSOD | (P11)gusA | wt | wt |
| 1h116 | | GFP | | | | |
| GLV- | GLV-1h68 | (PSE/L)Ruc- | (PSE/L)mMnSOD | (P11)gusA | wt | wt |
| 1h117 | | GFP | | | | |
| GLV- | GLV-1h68 | (PSE/L)Ruc- | (PSL)mMnSOD | (P11)gusA | wt | wt |
| 1h118 | | GFP | | | | |
| GLV- | GLV-1h68 | (PSE/L)Ruc- | (PSE)mIP-10 | (P11)gusA | wt | wt |
| 1h119 | | GFP | | | | |
| GLV- | GLV-1h68 | (PSE/L)Ruc- | (PSE/L)mIP-10 | (P11)gusA | wt | wt |
| 1h120 | | GFP | | | | |
| GLV- | GLV-1h68 | (PSE/L)Ruc- | (PSL)mIP-10 | (P11)gusA | wt | wt |
| 1h121 | | GFP | | | | |
| GLV- | GLV-1h68 | (PSE/L)Ruc- | (PSE)mLIGHT | (P11)gusA | wt | wt |
| 1h122 | | GFP | | | | |
| GLV- | GLV-1h68 | (PSE/L)Ruc- | (PSE/L)mLIGHT | (P11)gusA | wt | wt |
| 1h123 | | GFP | | | | |
| GLV- | GLV-1h68 | (PSE/L)Ruc- | (PSL)mLIGHT | (P11)gusA | wt | wt |
| 1h124 | | GFP | | | | |
| GLV- | GLV-1h68 | (PSE/L)Ruc- | (PSE)CBP | (P11)gusA | wt | wt |
| 1h125 | | GFP | | | | |
| GLV- | GLV-1h68 | (PSE/L)Ruc- | (PSE/L)CBP | (P11)gusA | wt | wt |
| 1h126 | | GFP | | | | |
| GLV- | GLV-1h68 | (PSE/L)Ruc- | (PSL)CBP | (P11)gusA | wt | wt |
| 1h127 | | GFP | | | | |
| GLV- | GLV-1h68 | (PSE/L)Ruc- | (PSE)P60 | (P11)gusA | wt | wt |
| 1h128 | | GFP | | | | |
| GLV- | GLV-1h68 | (PSE/L)Ruc- | (PSE/L)P60 | (P11)gusA | wt | wt |
| 1h129 | | GFP | | | | |
| GLV- | GLV-1h68 | (PSE/L)Ruc- | (PSL)P60 | (P11)gusA | wt | wt |
| 1h130 | | GFP | | | | |
| GLV- | GLV-1h68 | (PSE/L)Ruc- | (PSE)hFLH | (P11)gusA | wt | wt |
| 1h131 | | GFP | | | | |
| GLV- | GLV-1h68 | (PSE/L)Ruc- | (PSE/L)hFLH | (P11)gusA | wt | wt |
| 1h132 | | GFP | | | | |
| GLV- | GLV-1h68 | (PSE/L)Ruc- | (PSL)hFLH | (P11)gusA | wt | wt |
| 1h133 | | GFP | | | | |
| GLV- | GLV-1h68 | (PSE/L)CBG9 | (PSE/L)rTrfR- | (P11)gusA | wt | wt |
| 1h134 | | 9-mRFP1 | (P7.5)lacZ | | | |
| GLV- | GLV-1h68 | wt | (PSE/L)rTrfR- | (P11)gusA | wt | wt |
| 1e135 | | | (P7.5)lacZ | | | |
| GLV- | GLV-1h68 | (PSE/L)Ruc- | (PSE)PEDF | (P11)gusA | wt | wt |
| 1h136 | | GFP | | | | |
| GLV- | GLV-1h68 | (PSE/L)Ruc- | (PSE/L)PEDF | (P11)gusA | wt | wt |
| 1h137 | | GFP | | | | |
| GLV- | GLV-1h68 | (PSE/L)Ruc- | (PSL)PEDF | (P11)gusA | wt | wt |
| 1h138 | | GFP | | | | |
| GLV- | GLV-1h68 | (PSE/L)Ruc- | (PSE/L)rTrfR- | (PSE)hNET | wt | wt |
| 1h139 | | GFP | (P7.5)lacZ | | | |
| GLV- | GLV-1h68 | (PSE/L)Ruc- | (PSE)CYP11B1 | (P11)gusA | wt | wt |
| 1h140 | | GFP | | | | |
| GLV- | GLV-1h68 | (PSE/L)Ruc- | (PSE/L)CYP11B1 | (P11)gusA | wt | wt |
| 1h141 | | GFP | | | | |
| GLV- | GLV-1h68 | (PSE/L)Ruc- | (PSL)CYP11B1 | (P11)gusA | wt | wt |
| 1h142 | | GFP | | | | |
| GLV- | GLV-1h68 | (PSE/L)Ruc- | (PSE)CYP11B2 | (P11)gusA | wt | wt |
| 1h143 | | GFP | | | | |
| GLV- | GLV-1h68 | (PSE/L)Ruc- | (PSE/L)CYP11B2 | (P11)gusA | wt | wt |
| 1h144 | | GFP | | | | |
| GLV- | GLV-1h68 | (PSE/L)Ruc- | (PSL)CYP11B2 | (P11)gusA | wt | wt |
| 1h145 | | GFP | | | | |
| GLV- | GLV- | (PSE/L)Ruc- | (PSE)hNET | (PSE)IL-24 | wt | wt |
| 1h146 | 1h100 | GFP | | | | |
| GLV- | GLV-1h68 | (PSE/L)Ruc- | (PSE)HACE1 | (P11)gusA | wt | wt |
| 1h147 | | GFP | | | | |
| GLV- | GLV-1h68 | (PSE/L)Ruc- | (PSE/L)HACE1 | (P11)gusA | wt | wt |
| 1h148 | | GFP | | | | |
| GLV- | GLV-1h68 | (PSE/L)Ruc- | (PSL)HACE1 | (P11)gusA | wt | wt |
| 1h149 | | GFP | | | | |
| GLV- | GLV- | (PSE/L)Ruc- | (PSL)hNET | (PSE)IL-24 | wt | wt |
| 1h150 | 1h101 | GFP | | | | |
| GLV- | GLV-1h68 | (PSE/L) Ruc- | (PSE/L)TfR- | (PSE)hNIS | wt | wt |
| 1h151 | | GFP | (P7.5)lacZ | | | |
| GLV- | GLV-1h68 | (PSE/L) Ruc- | (PSE/L)TfR- | (PSE)hNISa | wt | wt |
| 1h153 | | GFP | (P7.5)lacZ | | | |
| GLV- | GLV-1h22 | (P_{SE/L}) Ruc- | (P_{SE/L})TfR- | (P_{SE/L})bfrₒₚₜ. | wt | wt |
| 1h154 | | GFP | (P_{7.5})lacZ | | | |
| GLV- | GLV-1h22 | (PSE/L) Ruc- | (PSE/L)TfR- | (PSE/L)hFH | wt | wt |
| 1h155 | | GFP | (P7.5)lacZ | | | |
| GLV- | GLV- | (PSE/L) Ruc- | (PSE/L)mtr | (PSE/L)bfrₒₚₜ | wt | wt |
| 1h156 | 1h113 | GFP | | | | |
| GLV- | GLV-1h68 | (PSE/L) Ruc- | (PSE/L)mtr | (PSE/L)hFH | wt | wt |
| 1h157 | | GFP | | | | |
| GLV- | GLV-1h68 | (PSE/L) Ruc- | (PSE/L)TfR- | (PSE/L)G6- | wt | wt |
| 1h158 | | GFP | (P7.5)lacZ | scAb | | |
| GLV- | GLV-1h68 | (PSE/L) Ruc- | (PSE/L)TfR- | (PSL)G6-scAb | wt | wt |
| 1h159 | | GFP | (P7.5)lacZ | | | |
| GLV- | GLV-1h68 | (PSE/L)Ruc- | (PSEL)luxAB | (P11)gusA | wt | wt |
| 1h160 | | GFP | | | | |
| GLV- | GLV-1h68 | (PSE/L)Ruc- | (PSE/L)TfR- | (PSEL)luxCD | wt | wt |
| 1h161 | | GFP | (P7.5)lacZ | | | |
| GLV- | GLV-1h68 | (PSEL)luxE | (PSE/L)rTrfR- | (P11)gusA | wt | wt |
| 1h162 | | | (P7.5)lacZ | | | |
| GLV- | GLV- | (PSE/L)Ruc- | (PSE)hNET | (PSE/L)G6- | wt | wt |
| 1h163 | 1h100 | GFP | | scAb | | |
| GLV- | GLV- | (PSE/L)Ruc- | (PSE)hNET | (PSL)G6-scAb | wt | wt |
| 1h164 | 1h100 | GFP | | | | |
| GLV- | GLV-1h68 | (PSE/L)Ruc- | (PSE)nAG | (P11)gusA | wt | wt |
| 1h165 | | GFP | | | | |
| GLV- | GLV-1h68 | (PSE/L)Ruc- | (PSEL)NAG | (P11)gusA | wt | wt |
| 1h166 | | GFP | | | | |
| GLV- | GLV-1h68 | (PSE/L)Ruc- | (PSL)nAG | (P11)gusA | wt | wt |
| 1h167 | | GFP | | | | |
| GLV- | GLV-1h68 | (PSE/L)Ruc- | (PSE)RLN | (P11)gusA | wt | wt |
| 1h168 | | GFP | | | | |
| GLV- | GLV-1h68 | (PSE/L)Ruc- | (PSEL)RLN | (P11)gusA | wt | wt |
| 1h169 | | GFP | | | | |
| GLV- | GLV-1h68 | (PSE/L)Ruc- | (PSL)RLN | (P11)gusA | wt | wt |
| 1h170 | | GFP | | | | |
| GLV- | GLV-1h68 | (PSE/L)Ruc- | (PSE)NM23A | (P11)gusA | wt | wt |
| 1h171 | | GFP | | | | |
| GLV- | GLV-1h68 | (PSE/L)Ruc- | (PSEL)NM23A | (P11)gusA | wt | wt |
| 1h172 | | GFP | | | | |
| GLV- | GLV-1h68 | (PSE/L)Ruc- | (PSL)NM23 | (P11)gusA | wt | wt |
| 1h173 | | GFP | | | | |
| GLV- | GLV-1h68 | (PSE/L)Ruc- | (PSE)NPPA1 | (P11)gusA | wt | wt |
| 1h174 | | GFP | | | | |
| GLV- | GLV-1h68 | (PSE/L)Ruc- | (PSEL)NPPA1 | (P11)gusA | wt | wt |
| 1h175 | | GFP | | | | |
| GLV- | GLV-1h68 | (PSE/L)Ruc- | (PSL)NPPA1 | (P11)gusA | wt | wt |
| 1h176 | | GFP | | | | |
| GLV- | GLV-1h68 | (PSE/L)Ruc- | (PSE)STAT1α | (P11)gusA | wt | wt |
| 1h177 | | GFP | | | | |
| GLV- | GLV-1h68 | (PSE/L)Ruc- | (PSEL)STAT1α | (P11)gusA | wt | wt |
| 1h178 | | GFP | | | | |
| GLV- | GLV-1h68 | (PSE/L)Ruc- | (PSL)STAT1α | (P11)gusA | wt | wt |
| 1h179 | | GFP | | | | |
| GLV- | GLV-1h68 | (PSE/L)Ruc- | (PSE)CPG2 | (P11)gusA | wt | wt |
| 1h180 | | GFP | | | | |
| GLV- | GLV-1h68 | (PSE/L)Ruc- | (PSEL)CPG2 | (P11)gusA | wt | wt |
| 1h181 | | GFP | | | | |
| GLV- | GLV-1h68 | (PSE/L)Ruc- | (PSL)CPG2 | (P11)gusA | wt | wt |
| 1h182 | | GFP | | | | |
| GLV- | GLV-1h68 | (PSE/L)Ruc- | (PSE)Ecad | (P11)gusA | wt | wt |
| 1h183 | | GFP | | | | |
| GLV- | GLV-1h68 | (PSE/L) Ruc- | (PSE/L)TfR- | (PSE)magA | wt | wt |
| 1h184 | | GFP | (P7.5)lacZ | | | |
| GLV- | GLV-1h68 | (PSE/L)Ruc- | (PSL)Ecad | (P11)gusA | wt | wt |
| 1h185 | | GFP | | | | |
| GLV- | GLV-1h68 | (PSE/L) Ruc- | (PSE/L)TfR- | (PSEL)FTL | wt | wt |
| 1h186 | | GFP | (P7.5)lacZ | 498-499InsTC | | |
| GLV- | GLV-1h68 | (PSE/L) Ruc- | (PSE/L)TfR- | (PSEL)FTL | wt | wt |
| 1h187 | | GFP | (P7.5)lacZ | | | |
| GLV- | GLV-1h68 | (PSE/L) Ruc- | (PSE/L)TfR- | (PSE)FUKW | wt | wt |
| 1h188 | | GFP | (P7.5)lacZ | | | |
| GLV- | GLV-1h68 | (PSE/L) Ruc- | (PSE/L)TfR- | (PSEL)FUKW | wt | wt |
| 1h189 | | GFP | (P7.5)lacZ | | | |
| GLV- | GLV-1h68 | (PSE/L) Ruc- | (PSE/L)TfR- | (PSL)FUKW | wt | wt |
| 1h190 | | GFP | (P7.5)lacZ | | | |
| GLV- | GLV-1h68 | (PSE/L)Ruc- | (PSE)STAT1β | (P11)gusA | wt | wt |
| 1h191 | | GFP | | | | |
| GLV- | GLV-1h68 | (PSE/L)Ruc- | (PSEL)STAT1β | (P11)gusA | wt | wt |
| 1h192 | | GFP | | | | |
| GLV- | GLV-1h68 | (PSE/L)Ruc- | (PSL) STAT1β | (P11)gusA | wt | wt |
| 1h193 | | GFP | | | | |
| GLV- | GLV- | (PSE)luxE | (PSE/L)TfR- | (PSEL)luxCD | wt | wt |
| 1h194 | 1h161 | | (P7.5)lacZ | | | |
| GLV- | GLV- | (PSE/L)Ruc- | (PSE)luxAB | (PSEL)luxCD | wt | wt |
| 1h195 | 1h161 | GFP | | | | |
| GLV- | GLV-1h68 | (PSE/L)Ruc- | (PSE)181a | (P11)gusA | wt | wt |
| 1h196 | | GFP | | | | |
| GLV- | GLV-1h68 | | | | | |
| 1h197 | | | | | | |
| GLV- | GLV-1h68 | (PSE/L)Ruc- | (PSL)181a | (P11)gusA | wt | wt |
| 1h198 | | GFP | | | | |
| GLV- | GLV-1h68 | (PSE/L)Ruc- | (PSE)335 | (P11)gusA | wt | wt |
| 1h199 | | GFP | | | | |
| GLV- | GLV-1h68 | (PSE/L)Ruc- | (PSL)335 | (P11)gusA | wt | wt |
| 1h201 | | GFP | | | | |
| GLV- | GLV-1h68 | | | | | |
| 1h202 | | | | | | |
| GLV- | GLV-1h68 | (PSE/L)Ruc- | (PSEL)126 | (P11)gusA | wt | wt |
| 1h203 | | GFP | | | | |
| GLV- | GLV-1h68 | | | | | |
| 1h204 | | | | | | |
| GLV- | GLV-1h68 | (PSE/L) Ruc- | (PSE/L)TfR- | (PSE)NANOG | wt | wt |
| 1h205 | | GFP | (P7.5)lacZ | | | |
| GLV- | GLV-1h68 | (PSE/L) Ruc- | (PSE/L)TfR- | (PSE)Oct4 | wt | wt |
| 1h208 | | GFP | (P7.5)lacZ | | | |
| GLV- | GLV-1h68 | (PSE/L)Ruc- | (P7.5E)hEPO | (P11)gusA | wt | wt |
| 1h210 | | GFP | | | | |
| GLV- | GLV-1h68 | (PSE/L)Ruc- | (PSE)hEPO | (P11)gusA | wt | wt |
| 1h211 | | GFP | | | | |
| GLV- | GLV-1h68 | (PSE/L)Ruc- | (PSEL)hEPO | (P11)gusA | wt | wt |
| 1h212 | | GFP | | | | |
| GLV- | GLV-1h68 | (PSE/L)Ruc- | (PSL)hEPO | (P11)gusA | wt | wt |
| 1h213 | | GFP | | | | |
| GLV- | GLV-1h68 | (PSE/L)Ruc- | (PSE)OspF | (P11)gusA | wt | wt |
| 1h214 | | GFP | | | | |
| GLV- | GLV-1h68 | (PSE/L)Ruc- | (PSE)OspG | (P11)gusA | wt | wt |
| 1h215 | | GFP | | | | |
| GLV- | GLV-1h68 | (PSE/L)Ruc- | (PSEL)OspG | (P11)gusA | wt | wt |
| 1h216 | | GFP | | | | |
| GLV- | GLV-1h68 | (PSE/L)Ruc- | (PSL)OspG | (P11)gusA | wt | wt |
| 1h217 | | GFP | | | | |
| GLV- | GLV-1h84 | ko | (PSE/L)CBG99- | (PSE)RLN | wt | wt |
| 1h218 | | | mRFP1 | | | |
| GLV- | GLV-1h84 | ko | (PSE/L)CBG99- | (PSEL)RLN | wt | wt |
| 1h219 | | | mRFP1 | | | |
| GLV- | GLV-1h84 | ko | (PSE/L)CBG99- | (PSL)RLN | wt | wt |
| 1h220 | | | mRFP1 | | | |
| GLV- | GLV- | (PSE)luxE | (PSEL)luxAB | (P11)gusA | wt | wt |
| 1h221 | 1h160 | | | | | |
| GLV- | GLV-1h68 | (PSE/L)Ruc- | (PSE)Ngn3 | (P11)gusA | wt | wt |
| 1h222 | | GFP | | | | |
| GLV- | GLV-1h68 | (PSE/L)Ruc- | (PSEL)Ngn3 | (P11)gusA | wt | wt |
| 1h223 | | GFP | | | | |
| GLV- | GLV-1h68 | (PSE/L)Ruc- | (PSL)Ngn3 | (P11)gusA | wt | wt |
| 1h224 | | GFP | | | | |
| GLV- | GLV-1h68 | (PSE/L)Ruc- | (PSE)hADH | (P11)gusA | wt | wt |
| 1h225 | | GFP | | | | |
| GLV- | GLV-1h68 | (PSE/L)Ruc- | (PSEL)hADH | (P11)gusA | wt | wt |
| 1h226 | | GFP | | | | |
| GLV- | GLV-1h68 | (PSE/L)Ruc- | (PSL)hADH | (P11)gusA | wt | wt |
| 1h227 | | GFP | | | | |
| GLV- | GLV- | (PSE)luxE | (PSE)luxAB | (PSEL)luxCD | wt | wt |
| 1h228 | 1h194 | | | | | |
| GLV- | GLV- | (PSEL)luxE | (PSE)luxAB | (PSEL)luxCD | wt | wt |
| 1h229 | 1h195 | | | | | |
| GLV- | GLV-1h68 | (PSE/L)Ruc- | (PSE)Myc-CTR1 | (P11)gusA | wt | wt |
| 1h230 | | GFP | | | | |
| GLV- | GLV-1h68 | (PSE/L)Ruc- | (PSL)Myc-CTR1 | (P11)gusA | wt | wt |
| 1h231 | | GFP | | | | |
| GLV- | GLV-1h68 | (PSE/L)Ruc- | (PSE)CTR1 | (P11)gusA | wt | wt |
| 1h232 | | GFP | | | | |
| GLV- | GLV-1h68 | (PSE/L)Ruc- | (PSE)mPEDF | (P11)gusA | wt | wt |
| 1h233 | | GFP | | | | |
| GLV- | GLV-1h68 | (PSE/L)Ruc- | (PSEL)mPEDF | (P11)gusA | wt | wt |
| 1h234 | | GFP | | | | |
| GLV- | GLV-1h68 | (PSE/L)Ruc- | (PSL)mPEDF | (P11)gusA | wt | wt |
| 1h235 | | GFP | | | | |
| GLV- | GLV-1h73 | (PSE/L)Ruc- | rtfr(PE/L) | (PSE)WTCDC6 | wt | wt |
| 1h236 | | GFP | (P7.5)lacZ | | | |
| GLV- | GLV-1h73 | (PSE/L)Ruc- | rtfr(PE/L) | (PSE)MutCDC6 | wt | wt |
| 1h237 | | GFP | (P7.5)lacZ | | | |
| GLV- | GLV-1h68 | (PSE/L) Ruc- | (PSE/L)TfR- | (PSL)CBG99- | wt | wt |
| 1h238 | | GFP | (P7.5)lacZ | mRFP1 | | |
| GLV- | GLV-1h68 | (PSE/L)Ruc- | (PSE)GLAF-3 | (P11)gusA | wt | wt |
| 1h239 | | GFP | | | | |
| GLV- | GLV-1h68 | (PSE/L)Ruc- | (PSEL)GLAF-3 | (P11)gusA | wt | wt |
| 1h240 | | GFP | | | | |
| GLV- | GLV-1h68 | (PSE/L)Ruc- | (PSL)GLAF-3 | (P11)gusA | wt | wt |
| 1h241 | | GFP | | | | |
| GLV- | GLV-1h68 | (PSE/L)Ruc- | (PE))luxABCDE | (P11)gusA | wt | wt |
| 1h242 | | GFP | | | | |
| GLV- | GLV- | (PSE/L)Ruc- | (PE))luxABCDE | (PSE)frp | wt | wt |
| 1h243 | 1h242 | GFP | | | | |
| GLV- | GLV- | (PSE/L) Ruc- | (PSE)hNISa | (PSEL)FUKW | wt | wt |
| 1h244 | 1h189 | GFP | | | | |
| GLV- | GLV- | (PSE/L) Ruc- | (PSEL)hNISa | (PSEL)FUKW | wt | wt |
| 1h245 | 1h189 | GFP | | | | |
| GLV- | GLV- | (PSE/L) Ruc- | (PSL)hNISa | (PSEL)FUKW | wt | wt |
| 1h246 | 1h189 | GFP | | | | |
| GLV- | GLV-1h68 | (PSE/L) Ruc- | (PSE/L)TfR- | (PSE)IFP | wt | wt |
| 1h247 | | GFP | (P7.5)lacZ | | | |
| GLV- | GLV-1h68 | (PSE/L) Ruc- | (PSE/L)TfR- | (PSEL)IFP | wt | wt |
| 1h248 | | GFP | (P7.5)lacZ | | | |
| GLV- | GLV-1h68 | (PSE/L) Ruc- | (PSE/L)TfR- | (PSL)IFP | wt | wt |
| 1h249 | | GFP | (P7.5)lacZ | | | |
| GLV- | GLV- | (PSE/L) Ruc- | (PSE/L)TfR- | (PSL)FUKW | wt | wt |
| 1h250 | 1h190 | GFP | (P7.5)lacZ | | | |
| GLV- | GLV-1h68 | (PSE)hNISa | (PSE/L)rTrfR- | (P11)gusA | wt | wt |
| 1h251 | | | (P7.5)lacZ | | | |
| GLV- | GLV-1h68 | (PSE/L)Ruc- | (PSE)hNISa | (P11)gusA | wt | wt |
| 1h252 | | GFP | | | | |
| GLV- | GLV-1h71 | ko | (PSE/L)TfR- | (PSE)FUKW | wt | wt |
| 1h253 | | | (P7.5)lacZ | | | |
| GLV- | GLV-1h71 | ko | (PSE/L)TfR- | (PSL)FUKW | wt | wt |
| 1h254 | | | (P7.5)lacZ | | | |
| GLV- | GLV-1h68 | (PSE/L)Ruc- | (PSE)hMMP9 | (P11)gusA | wt | wt |
| 1h255 | | GFP | | | | |
| GLV- | GLV-1h68 | (PSE/L)Ruc- | (PSL)hMMP9 | (P11)gusA | wt | wt |
| 1h256 | | GFP | | | | |
| GLV- | GLV-1h68 | (PSE/L) Ruc- | (PSE/L)TfR- | (PSE)mNeptune | wt | wt |
| 1h257 | | GFP | (P7.5)lacZ | | | |
| GLV- | GLV-1h68 | (PSE/L) Ruc- | (PSE/L)TfR- | (PSEL)mNeptune | wt | wt |
| 1h258 | | GFP | (P7.5)lacZ | | | |
| GLV- | GLV-1h68 | (PSE/L) Ruc- | (PSE/L)TfR- | (PSL)mNeptune | wt | wt |
| 1h259 | | GFP | (P7.5)lacZ | | | |
| GLV- | GLV-1h68 | (PSE)mNeptune | (PSE/L)rTrfR- | (P11)gusA | wt | wt |
| 1h260 | | | (P7.5)lacZ | | | |
| GLV- | GLV-1h68 | (PSEL)mNeptune | (PSE/L)rTrfR- | (P11)gusA | wt | wt |
| 1h261 | | | (P7.5)lacZ | | | |
| GLV- | GLV-1h68 | (PSL)mNeptune | (PSE/L)rTrfR- | (P11)gusA | wt | wt |
| 1h262 | | | (P7.5)lacZ | | | |
| GLV- | GLV- | (PSE)mNeptune | (PSE)hNET | (PSL)G6-scAb | wt | wt |
| 1h263 | 1h164 | | | | | |
| GLV- | GLV- | (PSEL)mNeptune | (PSE)hNET | (PSL)G6-scAb | wt | wt |
| 1h264 | 1h164 | | | | | |
| GLV- | GLV- | (PSL)mNeptune | (PSE)hNET | (PSL)G6-scAb | wt | wt |
| 1h265 | 1h164 | | | | | |
| GLV- | GLV- | (PSE/L) Ruc- | (PSE)AlstR | (PSEL)FUKW | wt | wt |
| 1h266 | 1h189 | GFP | | | | |
| GLV- | GLV- | (PSE/L) Ruc- | (PSEL)AlstR | (PSEL)FUKW | wt | wt |
| 1h267 | 1h189 | GFP | | | | |
| GLV- | GLV- | (PSE/L) Ruc- | (PSL)AlstR | (PSEL)FUKW | wt | wt |
| 1h268 | 1h189 | GFP | | | | |
| GLV- | GLV- | (PSE/L) Rue- | (PSE)PEPR1 | (PSEL)FUKW | wt | wt |
| 1h269 | 1h189 | GFP | | | | |
| GLV- | GLV- | (PSE/L) Ruc- | (PSEL)PEPR1 | (PSEL)FUKW | wt | wt |
| 1h270 | 1h189 | GFP | | | | |
| GLV- | GLV- | (PSE/L) Ruc- | (PSL)PEPR1 | (PSEL)FUKW | wt | wt |
| 1h271 | 1h189 | GFP | | | | |
| GLV- | GLV- | (PSE/L) Ruc- | (PSE)LAT4 | (PSEL)FUKW | wt | wt |
| 1h272 | 1h189 | GFP | | | | |
| GLV- | GLV- | (PSE/L) Ruc- | (PSEL)LAT4 | (PSEL)FUKW | wt | wt |
| 1h273 | 1h189 | GFP | | | | |
| GLV- | GLV- | (PSE/L) Ruc- | (PSL)LAT4 | (PSEL)FUKW | wt | wt |
| 1h274 | 1h189 | GFP | | | | |
| GLV- | GLV- | (PSE/L) Ruc- | (PSE)Cyp51 | (PSEL)FUKW | wt | wt |
| 1h275 | 1h189 | GFP | | | | |
| GLV- | GLV- | (PSE/L) Ruc- | (PSEL)Cyp51 | (PSEL)FUKW | wt | wt |
| 1h276 | 1h189 | GFP | | | | |
| GLV- | GLV- | (PSE/L) Ruc- | (PSL)Cyp51 | (PSEL)FUKW | wt | wt |
| 1h277 | 1h189 | GFP | | | | |
| GLV- | GLV- | (PSE/L)Ruc- | (PSE)BMP4 | (PSEL)FUKW | wt | wt |
| 1h284 | 1h189 | GFP | | | | |
| GLV- | GLV- | (PSE/L)Ruc- | (PSEL)BMP4 | (PSEL)FUKW | wt | wt |
| 1h285 | 1h189 | GFP | | | | |
| GLV- | GLV- | (PSE/L)Ruc- | (PSL)BMP4 | (PSEL)FUKW | wt | wt |
| 1h286 | 1h189 | GFP | | | | |

[0370] For example, GLV-1h68 (also named RVGL21, SEQ ID NO: 3; described in U.S. Pat. Pub. No. 2005-0031643, now U.S. Pat. Nos. 7,588,767, 7,588,771, 7,662,398) is an attenuated virus of the LIVP parental strain containing a genome set forth in SEQ ID NO: 2. GLV-1h68 contains DNA insertions in gene loci F14.5L (also designated in LIVP as F3) gene locus, thymidine kinase (TK) gene locus, and hemagglutinin (HA) gene locus with expression cassettes encoding detectable marker proteins. Specifically, GLV-1h68 contains an expression cassette containing a Ruc-GFP cDNA molecule (a fusion of DNA encoding Renilla luciferase and DNA encoding GFP) under the control of a vaccinia synthetic early/late promoter P_{SEL} ((P_{SEL})Ruc-GFP) inserted into the F14.5L gene locus; an expression cassette containing a DNA molecule encoding beta-galactosidase under the control of the vaccinia early/late promoter P_{7.5k} ((P_{7.5k})LacZ) and DNA encoding a rat transferrin receptor positioned in the reverse orientation for transcription relative to the vaccinia synthetic early/late promoter P_{SEL} ((P_{SEL})rTrfR) inserted into the TK gene locus (the resulting virus does not express transferrin receptor protein since the DNA molecule encoding the protein is positioned in the reverse orientation for transcription relative to the promoter in the cassette); and an expression cassette containing a DNA molecule encoding β-glucuronidase under the control of the vaccinia late promoter P₁₁ₖ ((P₁₁ₖ)gusA) inserted into the HA gene locus.

[0371] Other recombinant LIVP viruses are derived from GLV-1h68 and contain heterologous DNA that encodes a gene product or products (see e.g. see e.g. U.S. Pub. Nos. US2003-0059400, US2003-0228261, US2007-0202572, US2007-0212727, US2009-0117034, US2009-0098529, US2009-0053244, US2009-0155287, US2009-0081639, US2009-0136917, US2009-0162288, US2010-0062016, US2010-0233078 and US2010-0196325; U.S. Pat. Nos. 7,588,767, 7,588,771, 7,662,398 and 7,754,221 and 7,763,420; and International Pub. No. WO 2009/139921).

[0372] Exemplary of such recombinant viruses include those set forth in Table 5 above, including but not limited to, GLV-1h64 (set forth in SEQ ID NO: 14); viruses that encode the far-red fluorescent protein TurboFP635 (scientific name “Katushka”) from the sea anemone Entacmaea quadricolor include GLV-1h188 (SEQ ID NO: 15), GLV-1h189 (SEQ ID NO: 16), GLV-1h190 (SEQ ID NO: 17) and GLV-1h253 (SEQ ID NO: 18).

[0373] Modified vaccinia viruses also include viruses that are modified by introduction of heterologous nucleic acid into an LIVP strain containing a genome set forth in any of SEQ ID NO: 5-11, or a genome that exhibits at least 85%, 90%, 92%, 95%, 96%, 97%, 98%, 99% or more sequence identity to any of SEQ ID NOS:5-11. For example, exemplary of a modified vaccinia virus is a virus that is modified by insertion, deletion or replacement of heterologous nucleic acid compared to an LIVP strain having a genome set forth in SEQ ID NO: 5. Exemplary of such as strain is GLV-2b372, which contains TurboFP635 (Far-red fluorescent protein “katushka”) under the control of the vaccinia synthetic early/late promoter at the TK locus. The genome of GLV-1b372 has the sequence of nucleotides set forth in SEQ ID NO: 19.

### d. Methods of Generating Modified Viruses

[0374] Oncolytic viruses, such as vaccinia viruses (e.g. LIVP), for use in the combinations, compositions or methods herein can be modified by insertion, deletion, replacement or mutation as described herein, for example insertion or replacement of heterologous nucleic acid, using standard methodologies well known in the art for modifying viruses. Methods for modification include, for example, in vitro recombination techniques, synthetic methods, direct cloning, and in vivo recombination methods as described, for example, in Sambrook et al., Molecular Cloning: A Laboratory Manual, 2nd edition, Cold Spring Harbor Laboratory Press, cold Spring Harbor NY (1989).

[0375] For example, generation of recombinant viruses, including recombinant vaccinia virus, is well known in the art, and typically involves the generation of gene cassettes or transfer vectors using standard techniques in molecular biology (see, e.g., U.S. Pat. No. 7,588,767 and US2009-0053244-A1, which describe exemplary methods of generating recombinant LIVP vaccinia viruses). Such techniques include various nucleic acid manipulation techniques, nucleic acid transfer protocols, nucleic acid amplification protocols, and other molecular biology techniques known in the art. For example, point mutations or small insertions or deletions can be introduced into a gene of interest through the use of oligonucleotide mediated site-directed mutagenesis. In another example, homologous recombination can be used to introduce a mutation in the nucleic acid sequence or insertion or deletion of a nucleic acid molecule into a target sequence of interest. In some examples, mutations, insertions or deletions of nucleic acid in a particular gene can be selected for using a positive or negative selection pressure. See, e.g., Current Techniques in Molecular Biology, (Ed. Ausubel, et al.).

[0376] Nucleic acid amplification protocols include, but are not limited to, the polymerase chain reaction (PCR), or amplification via viruses or organisms, such as, but not limited to, bacteria, yeast, insect or mammalian cells. Use of nucleic acid tools such as plasmids, vectors, promoters and other regulating sequences, are well known in the art for a large variety of viruses and cellular organisms.

[0377] Nucleic acid transfer protocols include calcium chloride transformation/transfection, electroporation, liposome mediated nucleic acid transfer, N-[1-(2,3-dioloyloxy)propyl]-N,N,N-trimethylammonium methylsulfate meditated transformation, and others. Further a large variety of nucleic acid tools are available from many different sources, including various commercial sources. One skilled in the art will be readily able to select the appropriate tools and methods for genetic modifications of any particular virus according to the knowledge in the art and design choice.

[0378] Hence, any of a variety of modifications can be readily accomplished using standard molecular biological methods known in the art. The modifications will typically be one or more truncations, deletions, mutations or insertions of the viral genome. In one example, the modification can be specifically directed to a particular sequence in the viral genome. The modifications can be directed to any of a variety of regions of the viral genome, including, but not limited to, a regulatory sequence, a gene-encoding sequence, an intergenic sequence, a sequence without a known role, or a non-essential region of the viral genome. Any of a variety of regions of viral genomes that are available for modification are readily known in the art for many viruses, including LIVP.

[0379] Heterologous nucleic acid molecules are typically inserted into the viral genome in an intergenic region or in a locus that encodes a nonessential viral gene product. Insertion of heterologous nucleic acid at such sites generally does not significantly affect viral infection or replication in the target tissue. Exemplary insertion sites are known in the art and include, but are not limited to, J2R (thymidine kinase (TK)), A56R (hemagglutinin (HA)), F14.5L, vaccinia growth factor (VGF), A35R, NIL, E2L/E3L, K1L/K2L, superoxide dismutase locus, 7.5K, C7-K1L (host range gene region), B13R+B14R (hemorrhagic region), A26L (A type inclusion body region (ATI)) or I4L (large subunit, ribonucleotide reductase) gene loci. Insertion sites for the viruses also include sites that correspond to intragenic regions described in other poxviruses such as Modified Vaccinia Ankara (MVA) virus (exemplary sites set forth in U.S. Pat. No. 7,550,147), NYVAC (exemplary sites set forth in U.S. Pat. No. 5,762,938).

[0380] Methods for the generation of recombinant viruses using recombinant DNA techniques are well known in the art (e.g., see U.S. Pat. Nos. 4,769,330; 4,603,112; 4,722,848; 4,215,051; 5,110,587; 5,174,993; 5,922,576; 6,319,703; 5,719,054; 6,429,001; 6,589,531; 6,573,090; 6,800,288; 7,045,313; He et al. (1998) PNAS 95(5): 2509-2514; Racaniello et al., (1981) Science 214: 916-919; and Hruby et al., (1990) Clin Micro Rev. 3:153-170). Methods for the generation of recombinant vaccinia viruses are well known in the art (e.g., see Hruby et al., (1990) Clin Micro Rev. 3:153-170, U.S. Pat. Pub. No. 2005-0031643, now U.S. Pat. Nos. 7,588,767, 7,588,771, 7,662,398 and U.S. Pat. No. 7,045,313).

[0381] For example, generating a recombinant vaccinia virus that expresses a heterologous gene product typically includes the use of a recombination plasmid which contains the heterologous nucleic acid, optionally operably linked to a promoter, with vaccinia virus DNA sequences flanking the heterologous nucleic acid to facilitate homologous recombination and insertion of the gene into the viral genome. Generally, the viral DNA flanking the heterologous gene is complementary to a non-essential segment of vaccinia virus DNA, such that the gene is inserted into a nonessential location. The recombination plasmid can be grown in and purified from Escherichia coli and introduced into suitable host cells, such as, for example, but not limited to, CV-1, BSC-40, BSC-1 and TK-143 cells. The transfected cells are then superinfected with vaccinia virus which initiates a replication cycle. The heterologous DNA can be incorporated into the vaccinia viral genome through homologous recombination, and packaged into infection progeny. The recombinant viruses can be identified by methods known in the art, such as by detection of the expression of the heterologous gene product, or by using positive or negative selection methods (U.S. Pat. No. 7,045,313).

[0382] In another example, the recombinant vaccinia virus that expresses a heterologous gene product can be generated by direct cloning (see, e.g. U.S. Pat. No. 6,265,183 and Scheiflinger et al. (1992) Proc. Natl. Acad. Sci. USA 89: 9977-9981). In such methods, the heterologous nucleic acid, optionally operably linked to a promoter, is flanked by restriction endonuclease cleavage sites for insertion into a unique restriction endonuclease site in the target virus. The virus DNA is purified using standard techniques and is cleaved with the sequence-specific restriction endonuclease, where the sequence is a unique site in the virus genome. Any unique site in the virus genome can be employed provided that modification at the site does not interfere with viral replication. For example, in vaccinia virus strain LIVP, the NotI restriction site is located in the ORF encoding the F14.5L gene with unknown function (Mikryukov et al., Biotekhnologiya 4: 442-449 (1988)). Table 6 provides a summary of unique restriction sites contained in exemplary LIVP strains and designates the nucleotide position of each. Such LIVP strains can be modified herein by direct cloning and insertion of heterologous DNA into the site or sites. Generally, insertion is in a site that is located in a non-essential region of the virus genome. For example, exemplary modifications herein include insertion of a foreign DNA sequence into the NotI digested virus DNA.

TABLE 6
Unique restriction endonuclease cleavage sites in LIVP clonal isolates

| Restriction | | | | | | | | | LIVP |
|---|---|---|---|---|---|---|---|---|---|
| Enzyme/Site | | 1.1.1 | 2.1.1 | 4.1.1 | 5.1.1 | 6.1.1 | 7.1.1 | 8.1.1 | Parental |
| Name/ | SEQ | (SEQ ID | (SEQ ID | (SEQ ID | (SEQ ID | (SEQ ID | (SEQ ID | (SEQ ID | (SEQ ID |
| sequence | ID NO | NO: 5) | NO: 6) | NO: 7) | NO: 8) | NO: 9) | NO: 10) | NO: 11) | NO: 2) |
| SbfI | 26 | 40033/ | 40756/ | 39977/ | 40576/ | 40177/ | 40213/ | 40493/ | 38630/ |
| CCTGCAGG | | 40029 | 40752 | 39973 | 40572 | 40173 | 40209 | 40489 | 38626 |
| NotI | 27 | 42989/ | 43712/ | 42933/ | 43532/ | 43133/ | 43169/ | 43449/ | 41586/ |
| GCGGCCGC | | 42998 | 43716 | 42937 | 43536 | 43137 | 43173 | 43453 | 41590 |
| SgrAI | 28 | 114365/ | 115107/ | 114308/ | 114924/ | 114489/ | 114548/ | 114845/ | 112975/ |
| CRCCGGYG | | 114369 | 115111 | 114312 | 114928 | 114493 | 114552 | 114849 | 112979 |
| SmaI | 29 | 159260 | NA | NA | NA | NA | NA | NA | NA |
| CCCGGG | | | | | | | | | |
| TspMI | 30 | 159258/ | NA | NA | NA | NA | NA | NA | NA |
| CCCGGG | | 159262 | | | | | | | |
| XmaI | 31 | 159258/ | NA | NA | NA | NA | NA | NA | NA |
| CCCGGG | | 159262 | | | | | | | |
| ApaI | 32 | 180516/ | NA | 180377/ | 181027/ | 180638/ | 180596/ | 180972/ | NA |
| CCCGGG | | 180512 | | 180373 | 181023 | 180634 | 180592 | 180968 | |
| PspOMI | 33 | 180512/ | NA | 180373/ | 181023/ | 180634/ | 180592/ | 180968/ | NA |
| CCCGGG | | 180516 | | 180377 | 181027 | 180638 | 180596 | 180972 | |

[0383] In some examples, the virus genomic DNA is first modified by homologous recombination to introduce one or more unique restriction sites in the virus (see, e.g. Mackett et al. (1984) J. Virol. 857-864). Following cleavage with the restriction endonuclease, the cleaved DNA is optionally treated with a phosphatase to remove a phosphate moiety from an end of the DNA segment that is produced by cleavage with the endonuclease. Typically, a plasmid vector is generated that contains the heterologous DNA for insertion flanked by the restriction sites. Prior to insertion into the virus, the heterologous DNA is excised from the plasmid by cleavage with the sequence specific restriction endonuclease. The heterologous DNA is then ligated to the cleaved viral DNA and is packaged in a permissive cell line by infection of the cells with a helper virus, such as, but not limited to a fowlpox virus or a puv-inactivated helper vaccinia virus, and transfection of the ligated DNA into the infected cells.

[0384] In some examples, the methods involve homologous recombination and/or use of unique restriction sites in the virus. For example, a recombinant LIVP vaccinia virus with an insertion, for example, in the F14.5L gene (e.g., in the Not I restriction site of an LIVP isolate) can be prepared by the following steps: (a) generating (i) a vaccinia shuttle/transfer plasmid containing the modification (e.g. a gene expression cassette or a modified F14.5L gene) inserted at a restriction site, X (e.g. Not I), where the restriction site in the vector is flanked by parental virus sequences of the target insertion site and (ii) an LIVP virus DNA digested at restriction site X (e.g. Not I) and optionally dephosphorylated; (b) infecting cells with PUV-inactivated helper vaccinia virus and transfecting the infected host cells with a mixture of the constructs of (i) and (ii) of step a; and (c) isolating the recombinant vaccinia viruses from the transfectants. One skilled in the art knows how to perform such methods (see, e.g., Timiryasova et al. (Biotechniques 31: 534-540 (2001)). Typically, the restriction site X is a unique restriction site in the virus as described above.

[0385] 3. Methods of Producing Viruses

[0386] Viruses in the combinations, compositions and methods provided herein can be produced by methods known to one of skill in the art. Typically, the virus is propagated in host cells, quantified and prepared for storage before finally being prepared in the compositions described herein. The virus can be propagated in suitable host cells to enlarge the stock, the concentration of which is then determined. In some examples, the infectious titer is determined, such as by plaque assay. The total number of viral particles also can be determined. The viruses are stored in conditions that promote stability and integrity of the virus, such that loss of infectivity over time is minimized. In some examples, a large amount of virus is produced and stored in small aliquots of known concentration that can be used for multiple procedures over an extended period of time. Conditions that are most suitable for various viruses will differ, and are known in the art, but typically include freezing or drying, such as by lyophilization. The viruses can be stored at a concentration of 10⁵-10¹⁰ pfu/mL, for example, 10⁷-10⁹ pfu/mL, such as at least or about or 10⁶ pfu/mL, 10⁷ pfu/mL, 10⁸ pfu/mL or 10⁹ pfu/mL. Immediately prior to preparing compositions provided herein, the stored viruses can be reconstituted (if dried for storage) and diluted in an appropriate medium or solution.

[0387] The following sections provide exemplary methods that can be used for the production and preparation of viruses for use in preparing viruses.

[0388] a. Host Cells for Propagation

[0389] Virus strains can be propagated in an appropriate host cell. Such cells can be a group of a single type of cells or a mixture of different types of cells. Host cells can include cultured cell lines, primary cells, and proliferative cells. These host cells can include any of a variety of animal cells, such as mammalian, avian and insect cells and tissues that are susceptible to the virus, such as vaccinia virus, infection, including chicken embryo, rabbit, hamster, and monkey kidney cells. Suitable host cells include, but are not limited to, hematopoietic cells (totipotent, stem cells, leukocytes, lymphocytes, monocytes, macrophages, APC, dendritic cells, non-human cells and the like), pulmonary cells, tracheal cells, hepatic cells, epithelial cells, endothelial cells, muscle cells (e.g., skeletal muscle, cardiac muscle or smooth muscle), fibroblasts, and cell lines including, for example, chicken embryo fibroblast (CEF), CV-1, BSC40, Vero, and BSC-1, and human HeLa cells. Typically, viruses are propagated in cell lines that that can be grown at monolayers or in suspension. For example, exemplary cell lines for the propagation of vaccinia viruses include, but are not limited to, chicken embryo fibroblast (CEF), CV-1, BSC40, Vero, BGM, BSC-1 and RK-13 cells. Purification of the cultured strain from the system can be effected using standard methods.

[0390] b. Concentration Determination

[0391] The concentration of virus in a solution, or virus titer, can be determined by a variety of methods known in the art. In some methods, a determination of the number of infectious virus particles is made (typically termed plaque forming units (PFU)), while in other methods, a determination of the total number of viral particles, either infectious or not, is made. Methods that calculate the number of infectious virions include, but are not limited to, the plaque assay, in which titrations of the virus are grown on cell monolayers and the number of plaques is counted after several days to several weeks, and the endpoint dilution method, which determines the titer within a certain range, such as one log. Methods that determine the total number of viral particles, including infectious and non-infectious, include, but are not limited to, immunohistochemical staining methods that utilize antibodies that recognize a viral antigen and which can be visualized by microscopy or FACS analysis; optical absorbance, such as at 260 nm; and measurement of viral nucleic acid, such as by PCR, RT-PCR, or quantitation by labeling with a fluorescent dye.

[0392] c. Storage Methods

[0393] Once the virus has been purified (or to a desired purity) and the titer has been determined, the virus can be stored in conditions which optimally maintain its infectious integrity. Typically, viruses are stored in the dark, because light serves to inactivate the viruses over time. Viral stability in storage is usually dependent upon temperatures. Although some viruses are thermostable, most viruses are not stable for more than a day at room temperature, exhibiting reduced viability (Newman et al., (2003) J. Inf. Dis. 187:1319-1322). Vaccinia virus is generally stable at refrigerated temperatures, and can be stored in solution at 4° C., frozen at, for example −20° C., −70° C. or −80° C., or lyophilized with little loss of viability (Newman et al., (2003) J. Inf. Dis. 187:1319-1322, Hruby et al., (1990) Clin. Microb. Rev. 3:153-170). Methods and conditions suitable for the storage of particular viruses are known in the art, and can be used to store the viruses used in the methods presented herein.

[0394] For short-term storage of viruses, for example, up to 1 day, 2 days, 4 days or 7 days, temperatures of approximately 4° C. are generally recommended. For long-term storage, most viruses can be kept at −20° C., −70° C. or −80° C. When frozen in a simple solution such as PBS or Tris solution (20 mM Tris pH 8.0, 200 NaCl, 2-3% glycerol or sucrose) at these temperatures, the virus can be stable for 6 months to a year, or even longer. Repeated freeze-thaw cycles are generally avoided, however, since it can cause a decrease in viral titer. The virus also can be frozen in media containing other supplements in the storage solution which can further preserve the integrity of the virus. For example, the addition of serum or bovine serum albumin (BSA) to a viral solution stored at −80° C. can help retain virus viability for longer periods of time and through several freeze-thaw cycles.

[0395] In other examples, the virus sample is dried for long-term storage at ambient temperatures. Viruses can be dried using various techniques including, but not limited to, freeze-drying, foam-drying, spray-drying and desiccation. Water is a reactant in nearly all of the destructive pathways that degrade viruses in storage. Further, water acts as a plasticizer, which allows unfolding and aggregation of proteins. Since water is a participant in almost all degradation pathways, reduction of the aqueous solution of viruses to a dry powder provides an alternative composition methodology to enhance the stability of such samples. Lyophilization, or freeze-drying, is a drying technique used for storing viruses (see, e.g., Cryole et al., (1998) Pharm. Dev. Technol., 3(3), 973-383). There are three stages to freeze-drying; freezing, primary drying and secondary drying. During these stages, the material is rapidly frozen and dehydrated under high vacuum. Once lyophilized, the dried virus can be stored for long periods of time at ambient temperatures, and reconstituted with an aqueous solution when needed. Various stabilizers can be included in the solution prior to freeze-drying to enhance the preservation of the virus. For example, it is known that high molecular weight structural additives, such as serum, serum albumin or gelatin, aid in preventing viral aggregation during freezing, and provide structural and nutritional support in the lyophilized or dried state Amino acids such as arginine and glutamate, sugars, such as trehalose, and alcohols such as mannitol, sorbitol and inositol, can enhance the preservation of viral infectivity during lyophilization and in the lyophilized state. When added to the viral solution prior to lyophilization, urea and ascorbic acid can stabilize the hydration state and maintain osmotic balance during the dehydration period. Typically, a relatively constant pH of about 7.0 is maintained throughout lyophilization.

[0396] Other methods for the storage of viruses at ambient, refrigerated or freezing temperatures are known in the art, and include, but are not limited to, those described in U.S. Pat. Nos. 5,149,653; 6,165,779; 6,255,289; 6,664,099; 6,872,357; and 7,091,030; and in U.S. Pat. Pub. Nos. 2003-0153065, 2004-003841 and 2005-0032044.

### D. ADJUNCT THERAPY WITH COMPLEMENT INHIBITORS

[0397] Provided herein are combinations and compositions containing an oncolytic virus (e.g. vaccinia virus), such as a lipid-treated oncolytic virus, and a complement inhibitor. Complement is a system of over 30 serum and membrane-bound proteins that form a cascade of reactions that contribute to the elimination, and hence neutralization, of viruses and other microorganisms. In the combinations and compositions provided herein, a complement inhibitor, which is a biomolecule that targets one or more components of the complement system to thereby reduce activation or propagation of complement cascade, reduces the elimination of virus and thereby increases the infectivity of the oncolytic virus compared to the absence of the inhibitor. Hence, the combinations and compositions of an oncolytic virus (e.g. vaccinia virus), such as a lipid-treated oncolytic virus, and a complement inhibitor can be used in adjunct therapies to improve the therapeutic effect of an oncolytic virus, for example, for treatment of proliferative diseases and disorders, such as tumors or cancers.

[0398] The complement inhibitor can be administered prior to, simultaneously, or intermittently with the oncolytic virus. When administered simultaneously, the complement inhibitor can be administered in the same composition with the oncolytic virus or as a combination of two separate composition. Typically, the complement inhibitor is administered prior to the oncolytic virus. For example, the complement inhibitor is administered at least or up to 2 minutes, 3 minutes, 4 minutes, 5 minutes, 10 minutes, 15 minutes, 20 minutes, 30 minutes, 40 minutes, 50 minutes, 1 hour, 1.5 hours, 2 hours, 3 hours, 4 hours, 5 hours, 6 hours, 7 hours, 8 hours, 9 hours, 10 hours, 11 hours or 12 hours prior to administration of the oncolytic virus. Typically, the mode of administration of the oncolytic virus and complement inhibitor is the same so that both agents are exposed to the same bodily fluid. Typically, administration is systemic, such as by subcutaneous or intravenous administration.

[0399] In the adjunct therapies provided herein, the presence of a complement inhibitor in a combination or composition with an oncolytic virus increases the infectivity of the virus in a complement-containing bodily fluid (e.g. serum) by at least 1.2-fold, 1.3-fold, 1.4-fold, 1.5-fold, 1.6-fold, 1.7-fold, 1.8-fold, 1.9-fold, 2.0-fold, 2.5-fold, 3-fold, 4-fold, 5-fold, 10-fold or more compared to the infectivity of the virus in the bodily fluid (e.g. serum) in the absence of the complement inhibitor. In some examples, an oncolytic virus in combination or composition with a complement inhibitor exhibits increased virus titer after exposure to bodily fluid for a predetermined time (e.g. virus titer AUC or total virus recovery) by at least 1.2-fold, 1.3-fold, 1.4-fold, 1.5-fold, 1.6-fold, 1.7-fold, 1.8-fold, 1.9-fold, 2.0-fold, 2.5-fold, 3-fold, 4-fold, 5-fold or more compared to virus titer of the same oncolytic virus in the absence of the complement inhibitor. The predetermined time can be 1 minute to 12 hours, and generally is 1 minute to 2 hours, 1 minute to 1 hour, 1 minute to 30 minutes, for example, at least 2 minutes, 5 minutes, 10 minutes, 15 minutes, 20 minutes, 30 minutes, 40 minutes, 50 minutes, 60 minutes, 70 minutes, 80 minutes, 90 minutes, 100 minutes, 110 minutes, 120 minutes or more. In other examples, an oncolytic virus in combination or composition with a complement inhibitor exhibits increased half-life in a bodily fluid (e.g. serum) by at least 1.2-fold, 1.3-fold, 1.4-fold, 1.5-fold, 1.6-fold, 1.7-fold, 1.8-fold, 1.9-fold, 2.0-fold, 2.5-fold, 3-fold, 4-fold, 5-fold or more compared to half-life of the same oncolytic virus in the same bodily fluid (e.g. serum) in absence of the complement inhibitor.

[0400] In examples of the adjunct therapies provided herein, the presence of a complement inhibitor in a combination or composition with an oncolytic virus increases binding of the virus to blood cells by at least 1.2-fold, 1.3-fold, 1.4-fold, 1.5-fold, 1.6-fold, 1.7-fold, 1.8-fold, 1.9-fold, 2.0-fold, 2.5-fold, 3-fold, 4-fold, 5-fold, 10-fold or more compared to the binding of the virus to blood cells in the absence of the complement inhibitor.

[0401] 1. The Complement System and Virus Neutralization

[0402] The complement system is part of the immune system and plays a role in the elimination of invading foreign organisms and initiates inflammatory responses. There are over 30 soluble and cell-membrane proteins that are part of the complement system. The complement system constitutes an irreversible cascade of proteolytic events, resulting in the formation of multiple effector molecules that stimulate inflammation, facilitate antigen phagocytosis, and lyse some cells directly. The numbering of the complement components is based on the order of their discovery rather than the order of the sequence of reactions within the complement cascade. As a result, the sequence of reactions of the complement cascades is C1, C4, C2, C3, C5, C6, C7, C8, and C9. Several complement proteins are pro-enzyme proteases (termed zymogens) that are themselves activated by proteolytic cleavage to become effector proteases that cut peptide bonds in other complement proteins to activate them in turn. Following activation, the products of the cleavage reactions are designated by adding lower case letters, the larger fragment generally being designated “b” and the smaller fragment as “a” (e.g. C4 is cleaved to generate C4b and C4a).

[0403] There are three distinct pathways through which complement can be activated on the pathogen surface: the classical pathway, the alternative pathway, and the lectin pathway. These pathways are distinct in that the components required for their initiation are different, but the pathways are similar in that they converge to generate the same set of effector molecules. The convergence point of the pathways is the cleavage of C3 by C3 convertase (a C3 activating enzyme). Different enzyme complexes have C3 convertase activity. For example, in the classical pathway C4b2b acts as a C3 convertase, whereas in the alternative pathway, C3bBb is a C3 convertase. Cleavage of C3 generates C3b, which acts as an opsonin and as the main effector molecule of the complement system for subsequent complement reactions, and C3a, which is a peptide mediator of inflammation. The addition of C3b to each C3 convertase forms a C5 convertase that cleaves C5 to generate C5a and C5b. C5a, like C3a, is a peptide mediator of inflammation. C5b mediates the “late” events of complement activation initiating the sequence of reactions culminating in the generation of the membrane attack complex (MAC). Although the three pathways produce different C3 and C5 convertases, all of the pathways produce the split products of C3 and C5 and form MAC.

[0404] a. Complement Pathways

[0405] Virus infection can activate all three complement pathways. The classical pathway is activated by binding of C1q to antibody-antigen complexes formed on the surface of the virus or by C1q directly binding to cell surface components on viruses or other pathogens in the absence of specific antibodies. The lectin pathway is activated upon the interaction of mannan-binding lectin (MBL) with viral surface carbohydrates. The alternative pathway is activated by binding of C3b to the pathogen surface.

[0406] i. Classical Pathway

[0407] C1q is the first component of the classical pathway of complement. C1q is a calcium-dependent binding protein associated with the collectin family of proteins due to an overall shared structural homology (Malhotra R et al., Clin Exp Immunol. 1994, 97(2):4-9; Holmskov et al. Immunol Today. 1994, 15(2):67-74). C1q initiates the classical pathway of complement in two different ways. First, the classical pathway is activated by the interaction of C1q with immune complexes (i.e. antigen-antibody complexes of aggregated IgG or IgM antibody). IgA, IgE and IgD do not bind C1q and cannot activate complement. Second, C1q also is able to activate complement in the absence of antibody by the interaction of C1q with non-immune molecules such as polyanions (bacterial lipopolysaccharides, DNA, and RNA), certain small polysaccharides, viral membranes, C reactive protein (CRP), serum amyloid P component (SAP), and bacterial, fungal and virus membrane components.

[0408] C1q is part of the C1 complex which contains a single C1q molecule bound to two molecules each of the zymogens C1r and C1s. Binding of more than one of the C1q globular domains to a target surface (such as aggregated antibody or a pathogen), causes a conformational change in the (C1r:C1s)₂ complex, which results in the activation of the C1r protease to cleave C1s to generate an active serine protease. Active C1s cleaves subsequent complement components C4 and C2 to generate C4b and C2b, which together form the C3 convertase of the classical pathway. The C3 convertase cleaves C3 into C3b, which covalently attaches to the pathogen surface and acts as an opsonin, and C3a, which stimulates inflammation. Some C3b molecules associate with C4b2b complexes yielding C4b2b3b which is the classical cascade C5 convertase.

[0409] ii. Alternative Pathway

[0410] The alternative pathway is initiated by foreign pathogens in the absence of antibody. Instead, the initiation of complement by the alternative pathway occurs through the spontaneous hydrolysis of C3 into C3b. A small amount of C3b is always present in body fluids, due to serum and tissue protease activity. C3b is an opsonin that recognizes and binds to pathogen surfaces. C3b on pathogen surfaces is recognized by the protease zymogen Factor B. Factor B, which is the only activating protease of the complement system that circulates as an active enzyme rather than as a zymogen, is cleaved by Factor D. Cleavage of Factor B by Factor D yields the active product Bb which can associate with C3b to form C3bBb, the C3 convertase of the alternative pathway. Similar to the classical pathway, the C3 convertase produces more C3b and C3a from C3. C3b covalently attaches to the pathogen surface and acts as an opsonin, while C3a stimulates inflammation. Some C3b joins the complex to form C3bBb3b, the alternative pathway C5 convertase. C3bBb3b is stabilized by the plasma protein properdin or Factor P which binds to microbial surfaces and stabilizes the convertase.

[0411] iii. Lectin Pathway

[0412] The lectin pathway (also referred to as the MBL pathway) is initiated following recognition and binding of carbohydrate moieties (e.g. N-acetyl glucosamine and mannose structures) on the surface of pathogens by lectin proteins, such as mannose binding lectin (MBL) and ficolins (i.e. L-ficolin, M-ficolin, and H-ficolin). The lectin molecule interacts with two protease zymogens, MASP-1 and MASP-2. When the lectin protein (e.g. MBL) binds to the pathogen surface, MASP-1 and MASP-2 become activated to form an MBL complex with the lectin protein, resulting in cleavage of C4 and C2 and the generation of the MBL cascade C3 convertase (C4bC2b). When C3 is cleaved by the convertase, C3b then joins the complex to form the MBL cascade C5 convertase.

[0413] b. Complement Effector Mechanisms

[0414] Regardless of which initiation pathway is used, the end result is the formation of activated fragments of complement proteins (e.g. C3a, C4a, and C5a anaphylatoxins and C5b-9 membrane attack complexes) that ultimately result in the neutralization and elimination of virus. In particular, these fragments mediate several functions including leukocyte chemotaxis, activation of macrophages, vascular permeability and cellular lysis (Frank, M. and Fries, L. Complement. In Paul, W. (ed.) Fundamental Immunology, Raven Press, 1989).

[0415] i. Opsonization

[0416] An important action of complement is to facilitate the uptake and destruction of pathogens by phagocytic cells. This occurs by a process termed opsonization, whereby complement components bound to target pathogen (e.g. virus), interact with complement receptors on the surface of phagocytic cells such as neutrophils or macrophages. In this instance, the complement effector molecules are termed opsonins. Opsonization of pathogens is a major function of C3b and C4b. iC3b also functions as an opsonin. C3a and C5a increase the expression of C3b receptors on phagocytes and increase their metabolic activity.

[0417] ii. Virolysis by the Membrane Attack Complex (MAC)

[0418] The final step of the complement cascade by all three pathways is the formation of the membrane attack complex (MAC) bound to the surface of the pathogen. At the point of convergence of the pathways, each pathway generates a C3 convertase on the surface of pathogens. For example, in the classical and lectin pathways, the C3 convertase is formed when C4b and C2b combine on the surface of the pathogens. The C3 convertase cleaves C3 to generate C5 convertase fixed on a pathogen surface.

[0419] Once fixed on the pathogen surface, the C5 convertase cleaves serum C5 into C5a and C5b. The C5a acts as a proinflammatory anaphylatoxin, while C5b remains bound to the C5 convertase on the surface. The complex is stabilized by binding of C6. The MAC is complete after further binding of C7, C8 and C9. C7 exposes hydrophobic regions that facilitate penetration into the pathogen membrane, C8 stabilizes the complex in the membrane to initiate pore formation, and the addition of at least four molecules of C9 effects the formation of a tunnel that permits water and solutes to pass, resulting in osmotic lysis and cell death. The formation of the MAC can be disrupted by proteins that bind to the complex before membrane insertion such as Streptococcal inhibitor of complement (SIC), clusterin and anti-C5 antibody (e.g. ecluzimumab).

[0420] iii. Proinflammatory Mediator Anaphylatoxin

[0421] Complement activation also can result in other effector functions. For example, complement activation results in the formation of several proinflammatory mediators such as C3a, C4a, and C5a, and stable desArg derivatives thereof. C3a, C4a and C5a, and to a lesser extent their desArg derivatives, are potent bioactive polypeptides or anaphylatoxins that bind to receptors on various cell types to stimulate smooth muscle contraction, increase vascular permeability, and activate mast cells to release inflammatory mediators. C5a also acts as a chemotactic factor for leukocytes and neutrophils, thereby inducing the movement of the cells to the site of infection. For example, phagocytes can move towards increasing concentrations of C5a and subsequently attach, via their CR1 receptors, to C3b molecules attached to the pathogen surface, resulting phagocytosis and elimination of the pathogen by the cell. Finally, complement also can induce humoral immunity against viruses by increasing viral antigen presentation, which is enhanced when antigen-presenting cells, such as dendritic cells, recognize opsonized virus (e.g. C3b-bound virus) via specific complement receptors (e.g. CR1 or CR3).

[0422] 2. Exemplary Complement Inhibitors

[0423] The complement inhibitor used in the combinations, compositions, methods and uses herein can be any biomolecule that inhibits one or more components of at least one of the complement pathways to prevent or reduce activity of the component, and thereby reduce complement activation and/or propagation of the complement cascade. In particular, reducing or inhibiting a complement component can result in a reduction or decrease in one or more of a complement-mediated effector function from among opsonization, anaphylatoxin activity or cell membrane attack complex lysing.

[0424] The inhibitor can inhibit activation of at least one native complement component, at least one activated complement component, or at least one complement receptor. For example, the complement inhibitor inhibits activity of one or more of a native or non-activated complement component from among C1, C2, C3, C4, C5, C6, C7, C8, C9, Factor B, Factor D or properdin. In other examples, the complement inhibitor inhibits activity of one or more of an activated complement component from among C1r, C1s, C2a, C3a, C3b, C4a, C4b, C5a, C5b, Bb, C3 convertase, C5 convertase or MAC. In further examples, the complement inhibitor inhibits activity of a complement receptor from among complement receptor 1 (CR1), CR2, CR3 or CR4. In particular, the inhibitor can be one or more of a C1 inhibitor, a C3 inhibitor, a C5 inhibitor, a C5a inhibitor, a C5aR inhibitor, a C3aR inhibitor, a factor P inhibitor, a factor B inhibitor.

[0425] Complement inhibitors include peptides, polypeptides, antibodies, small molecules, and nucleic acids (e.g., aptamers, RNAi agents such as short interfering RNAs). The peptide or protein can be natural or purified, or can be synthetic. In particular examples herein, the inhibitor is an antibody or fragment thereof that binds to or inhibits activity of a complement component. For example, the inhibitor is an anti-C2, anti-C3, anti-C4, anti-C5, anti-Factor B or anti-C1q antibody or fragment thereof that specifically binds to C2, C3, C4, C5, Factor B or C1q, respectively. Complement inhibitors are well known to a skilled artisan (see e.g. International Publication No. WO2012/174055; U.S. Pat. Nos. 5,624,837; 5,627,264; 5,847,082; 6,355,245; 6,956,107; 6,998,468; Morgan and Harris (2003) Mol. Immunol, 40:159-70; Ricklin and Lambris (2007) Nat. Biotechnol., 25:1265-1275; Qu et al. (2009) Molecular Immunology, 47:185-195). Exemplary inhibitors are set forth in Table 7.

[0426] For example, the complement inhibitor is one that inhibits Factor B. For example, cobra venom factor (CVF) binds to Factor B and thereby consumes available C3 without activation of C3. A Factor B inhibitor also includes, for example, an anti-factor B antibody designated TA 106 (Taligen Therapeutics).

[0427] The complement inhibitor can inhibit C1. For example, the complement inhibitor is a polyanionic glycosaminoglycan, such as heparin, which binds and inactivates C1, thereby blocking C3 convertase formation and MAC formation (e.g. Baker, P. J. et al. (1975) J. Immunol, 114:554-558).

[0428] The complement inhibitor can inhibit activation of C2 or C4. Such inhibitors include inhibitors that indirectly inhibit activation of C2 or C4. For example, C1-inhibitor (C1-INH) is a protease inhibitor that irreversibly binds to and inactivates C1r and C1s in the C1 complex in the classical pathway or MASP-1 and MASP-2 proteases in the MBL complex of the lectin pathway. Hence, C1-INH prevents the proteolytic cleavage of later complement components C4 and C2 by C1 and MBL. Indirect inhibitors of C2 and C4 also include, for example, antibodies against C1s (Carroll S and Georgiou G (2013) Immunobiology, 218:1041-8). Inhibitors also can include anti-C2/C2a antibodies (see e.g. U.S. Pat. No. 6,998,468).

[0429] The complement inhibitor can inhibit C3. For example, the inhibitor is a compstatin, which is a peptide inhibitor that binds to C3 and prevents cleavage thereof (Sahu et al. (1996) J. Immunol., 157:884-891). Compstatin is a small molecular weight disulfide bonded cyclic peptide having the sequence Ile-Cys-Val-Val-Gln-Asp-Trp-Gly-His-His-Arg-Cys-Thr (SEQ ID NO:34). Other C3 inhibitors include a compstatin analog, a compstatin peptidomimetic or a compstatin derivative. Examples of compstatin analogs, derivatives and peptidomimetics are described in the art (see e.g. U.S. Pat. No. 6,319,897, WO/1999/013899 and WO/2004/026328). The structure and function of compstatin and variants thereof are summarized in Ricklin and Lambris (2008) Adv. Exp. Med. Biol., 632:273-292). Since C3 is a central component of all three pathways of complement activation, compstatin and analogs, peptidomimetics or derivatives thereof are able to inhibit activation of the converging protein of all three pathways.

[0430] C3 and C5 convertases also can be inhibited by inhibiting C3b or C4b. For example, the complement inhibitor can be a soluble CR1, which is a soluble form of the complement receptor that acts as the C3b/C4b receptor. Thus, soluble CR1 can act as an antagonist of C3b or C4b, and thereby prevent the formation of the convertases (see e.g. published International PCT Appl. No. WO1994/026786).

[0431] The complement inhibitor can inhibit C5. For example, the complement inhibitor is a small molecule, such as K76COOH, which is from Stachybotrys complementi (e.g. Hong et al. (1981) J. Immunol, 127:104-108). The complement inhibitor also can be an anti-C5 antibody (see subsection below). For example, eculizumab (Alexion Pharmaceuticals, Cheshire, Conn.) is an anti-C5 antibody that binds to C5 and prevents its cleavage into C5a and C5b, and Pexelizumab is an scFv fragment of eculizumab that exhibits similar activity (U.S. Pat. No. 6,355,245). The anti-C5 antibody designated TSA12/22 also is an scFv against C5, and is the framework for the anti-C5 antibody minibody (Mubodina®, Adienee; U.S. Pat. No. 7,999,081). ARC 1905 (Archemix), an anti-C5 aptamer, binds to and inhibits cleavage of C5, inhibiting the generation of C5b and C5a. The C5 inhibitory protein Ornithodoros moubata Complement Inhibitor (OmCI, Nunn, M. A. et al J Immunol 2005, 174:2084-2091) from soft tic Ornithodoros moubata has been hypothesized to bind to the distal end of the CUB-C5d-MG8 superdomain, which is close to the convertase cleavage site (Fredslund et al. Nat Immunol 2008, 9 (7):753-760).

[0432] The complement inhibitor can inhibit C5a or C5aR. C5a can be inhibited directly using an inhibitor that binds to C5a. For example, TNX-558 (Tanox) is an antibody that neutralizes C5a by binding to C5a. Anti-C5a spiegelmers, which are nucleotide L-RNA oligonucleotides that acts like an aptamer to specifically bind and inhibit C5a and C5a-desArg also are known (e.g. NOX-D19; U.S. Pat. No. 8,507,456 and International PCT Appl. No. WO2013104540) C5a also can be inhibited indirectly by preventing or significantly reducing the binding of C5a to its receptor, C5aR. A number of C5aR inhibitors are known in the art. For example, PMX-53 (Peptech) is a small cyclic hexapeptide that is a C5aR antagonist. Analogs of PMX-53 (e.g. PMX-201 and PMX-205) that also function as C5aR antagonists are also available (see for instance Proctor et al., 2006, Adv Exp Med Biol. 586:329-45 and U.S. Pat. Pub. No. 20060217530). Neutrazumab (G2 Therapies) binds to extracellular loops of C5aR, thereby inhibiting binding of C5a to C5aR. C5a also can be inhibited by reducing or preventing the formation of C5a, using inhibitors that target C5 to prevent cleavage of C5 into C5a and C5b (see above for C5 inhibitors).

[0433] Exemplary complement inhibitors, including those that have been approved for clinical use or are currently in clinical trials, are set forth in Table 7. Any of the above complement inhibitors, including any set forth in Table 7, can be used in a combination or composition with an oncolytic vaccinia virus for use to increase the infectivity of the oncolytic virus compared to the absence of the inhibitor. For example, provided herein are combinations or compositions containing an oncolytic virus or lipid-emulsion oncolytic virus and complement inhibitor, such as any complement inhibitor that inhibits C1, C2, C3, C4, C5, C5a, C5aR, C3aR, Factor B, Factor P, C1q or MBP. For example, the inhibitor can be cobra venom factor (CVF), heparin, TA 106, TNX-234, anti-properdin, C1-INH, a compstatin or derivative or analog thereof, soluble CR1, K76COOH, eculizumab, pexelizumab, TSA12/22, MSA12/22, ARC 1005, TNX-558, NOX-D19, PMX-53, PMX-201, PMX-205, neutrazumab, or variants, analogs or derivatives thereof. In particular examples, the complement inhibitor is an anti-C5 antibody eculizumab, pexelizumab, TSA12/22 or MB12/122, or a variant thereof, such as eculizumab.

TABLE 7
Exemplary Complement Inhibitors

| | | | Example of |
|---|---|---|---|
| | | | Commercial |
| Target | Inhibitor | Reference | Therapeutic |
| C1r/C1s | C1-INH | 5,030,578 | Berinert ® (CSL |
| | | | Behring); Cinryze ® |
| | | | (ViroPharma); |
| | | | Cetor-n ® (Sanquin); |
| | | | Rhucin ® (Pharming) |
| C3b/C4b | soluble | WO 1994/026786; | TP10 (Celldex |
| | complement | WO 1998/002454; | Therapeutics, Inc.; |
| | receptor | 5,856,300; | also called |
| | type 1 | 5,856,297 | CDX-1135); |
| | (sCR1) | | TP20 (Celldex |
| | | | Therapeutics, |
| | | | also called |
| | | | sCR1sLEx); |
| | | | Mirococept |
| | | | (Inflazyme |
| | | | Pharmaceuticals, |
| | | | also called |
| | | | APT070) |
| Factor B | anti-Factor B | 7,964,705; | TA106 (Taligen |
| | antibody | 7,999,082 | Therapeutics) |
| Factor D | anti-Factor D | 6,956,107; | TNX-234 (Tanox) |
| | antibody | 7,112,327 | |
| properdin | anti-properdin | 8,435,512 | anti-properdin |
| (Factor P) | antibody | | (Novelmed |
| | | | Therapeutics) |
| C3 | Compstatin and | 6,319,897; WO/ | APL-1 (Apellis |
| | analogs | 1999/013899 and | Pharmaceuticals; |
| | | WO/2004/026328 | also called |
| | | | POT-4) |
| C5 | anti-C5 | 6,355,245 | eculizumab |
| | antibody | 7,999,081 | (Soliris ®, |
| | | | Alexion |
| | | | Pharmaceuticals, |
| | | | also designated |
| | | | 5G1.1); |
| | | | pexelizumab |
| | | | (Alexion |
| | | | Pharmaceuticals); |
| | | | TS-A12/22 |
| | | | (Adienne) |
| | anti-C5 | 7,999,081; | Mubodina ® |
| | minibody | Marzari et al. | (Adienne; also |
| | | (2002) Eur. J. | called MB 12/22) |
| | | Immunol., | |
| | | 32: 2773-82 | |
| | Aptamer- | 7,538,211 | ARC 1905 |
| | based C5 | | (Archemix) |
| | inhibitor | | |
| | C5 binding | International | |
| | polypeptide | PCT. Appl. No. | |
| | | WO2013126006 | |
| C5a | anti-C5a | US2003/0129187 | TNX-558 (Tanox) |
| | antibody | | |
| | Anti-C5a | 8,507,466 | NOX-D19 (Noxxon |
| | spiegelmers | | PharmaAg) |
| C5aR | C5aR | Finch et al. | PMX-53 (Peptech) |
| | peptidomimetic | (1999) J. Med. | |
| | | Chem., 42: | |
| | | 1965-1974; | |
| | | Kohl (2006) | |
| | | Curr. Opin. | |
| | | Mol. Ther., | |
| | | 8: 529-38 | |
| | anti-C5aR | 8,071,096 | Neutrazumab (G2 |
| | antibody | | Therapies) |

[0434] Anti-C5 Antibody

[0435] In particular, provided herein are combinations and compositions containing an oncolytic virus or a lipid-emulsion oncolytic virus and an anti-C5 antibody or antigen-binding fragment thereof. An anti-C5 antibody or antigen-binding fragment thereof binds to complement component C5 or active fragments thereof, and thereby blocks the generation and/or activity of complement components C5a and/or C5b. Through this blocking effect, the antibodies inhibit the proinflammatory (anaphylatoxic) effects of C5a and/or the generation of the C5b-9 membrane attack complex (MAC).

[0436] Anti-C5 antibodies include antibodies that specifically bind to C5 with an association constant (Ka) that is higher than 10⁶ M⁻¹, such as greater than 10⁷ M⁻¹, 10⁸ M⁻¹, 10⁹ M⁻¹, 10¹⁰ M⁻¹ or greater. In some embodiments, an anti-C5 antibody has a dissociation constant (K_{d}) of less than 10⁻⁶, 10⁻⁷, 10⁻⁸, 10⁻⁹, 10⁻¹⁰, 10⁻¹¹, or 10⁻¹²M.

[0437] Anti-C5 antibodies include antibodies that specifically bind to the beta chain or alpha chain of C5. C5 is synthesized as a single chain precursor protein of 1659 amino acids along with an 18 amino acid leader sequence (SEQ ID NO:35). After removal of the 18 amino acid signal peptide, the pro-C5 precursor is cleaved to remove the four amino acid residue propeptide corresponding to amino acid residues 674 to 677 of SEQ ID NO:35 to yield a mature two-chain protein containing a beta chain (corresponding to amino residues 19-673 of SEQ ID NO:35) and an alpha chain (amino acid residues 678-1676 of SEQ ID NO:35) that are disulfide linked. The C5 convertase activates C5 by cleaving the alpha chain, thereby releasing C5a and generating C5b, which is the remaining portion of the alpha chain linked to the beta chain by the disulfide bond (beta chain+alpha′ chain).

[0438] For example, antibodies that are immunoreactive against the C5 beta chain include N19-8 and N20-9 antibody and related antibodies (Moongkarndi et al. Immunobiol. 1982, 162:397; Moongkarndi et al. (1983) Immunobiol. 165:323; Mollnes et al. (1988) Scand. J. Immunol. 28:307-312).

[0439] Antibodies that are immunoreactive against the C5 alpha chain are described in U.S. Pat. No. 6,355,245 or U.S. Pat. No. 7,999,081. In particular examples, an antibody that inhibits C5 through binding to the alpha chain are able to both block complement hemolytic activity and the generation of C5a.

[0440] Antibodies that are immunoreactive against the C5 alpha chain also are described in U.S. Pat. No. 6,355,245. In particular, among anti-C5 antibodies or antigen-binding fragments in the combinations and compositions provided herein for use in adjunct therapy with an oncolytic virus include antibodies that bind at a C5 epitope designated KSSKC epitope (Val Ile Asp His Gln Gly Thr Lys Ser Ser Lys Cys Val Arg Gln Lys Val Glu Gly Ser Ser; SEQ ID NO:48). For example, the anti-C5 antibody or antigen-binding fragment thereof contains a heavy chain variable region and a light chain variable region, wherein the heavy chain variable region contains CDRs set forth in SEQ ID NO:36-38 and the light chain variable region contains CDRs set forth in SEQ ID NO:39-41. Such antibodies include, but are not limited to, eculizumab or pexelizumab, or variants or derivatives thereof.

[0441] The antibody can be a human or humanized antibody. In particular examples, the anti-C5 antibody or antigen-binding fragment thereof is a humanized antibody containing the mouse CDRs set forth in SEQ ID NOS: 36-41 and having a sequence of amino acids containing a heavy chain variable region set forth in SEQ ID NO:42 and a light chain variable region set forth in SEQ ID NO:43.

[0442] The anti-C5 antibody herein can be a full-length IgG1, IgG2, IgG3 and/or IgG4 antibody. For example, the anti-C5 antibody can be the anti-C5 antibody designated eculizumab, which is marketed under the name Soliris®. Eculizumab is a humanized IgG2/4 kappa antibody, made up of two 448 amino acid heavy chains and two 214 amino acid light chains. The heavy chains are composed of human IgG2 sequences in constant region 1, the hinge and the adjacent portion of constant region 2, and human IgG4 sequences in the remaining part of constant region 2 and 3. The light chain is composed of human kappa sequences. The sequence of amino acids of the heavy chain of eculizumab is set forth in SEQ ID NO:44 and the sequence of amino acids of the light chain is set forth in SEQ ID NO:45.

[0443] The anti-C5 antibody also can be an antigen-binding fragments of a full-length anti-C5 antibody, such as a full-length eculizumab. Antibody fragments, which are derivatives of full-length antibodies that contain less than the full sequence of the full-length antibodies but retain at least a portion of the specific binding abilities of the full-length antibody, for example the variable portions of the heavy and light chain. The antibody fragments also can include antigen-binding portions of an antibody that can be inserted into an antibody framework (e.g., chimeric antibodies) in order to retain the binding affinity of the parent antibody. Examples of antibody fragments include, but are not limited to, Fab, Fab′, F(ab′)₂, single-chain Fv (scFv), Fv, dsFv, diabody, Fd and Fd′ fragments, and other fragments, including modified fragments (see, for example, Methods in Molecular Biology, Vol. 207: Recombinant Antibodies for Cancer Therapy Methods and Protocols (2003); Chapter 1; p 3-25, Kipriyanov). Antibody fragments can include multiple chains linked together, such as by disulfide bridges and can be produced recombinantly Antibody fragments also can contain synthetic linkers, such as peptide linkers, to link two or more domains. Methods for generating antigen-binding fragments are well-known known in the art and can be used to modify any antibody provided herein. Fragments of antibody molecules can be generated, such as for example, by enzymatic cleavage. For example, upon protease cleavage by papain, a dimer of the heavy chain constant regions, the Fc domain, is cleaved from the two Fab regions (i.e. the portions containing the variable regions).

[0444] Single chain antibodies can be recombinantly engineered by joining a heavy chain variable region (V_{H}) and light chain variable region (V_{L}) of a specific antibody. The particular nucleic acid sequences for the variable regions can be cloned by standard molecular biology methods, such as, for example, by polymerase chain reaction (PCR) and other recombination nucleic acid technologies. Methods for producing scFvs are described, for example, by Whitlow and Filpula (1991) Methods, 2: 97-105; Bird et al. (1988) Science 242:423-426; Pack et al. (1993) Bio/Technology 11:1271-77; and U.S. Pat. Nos. 4,946,778, 5,840,300, 5,667,988, 5,658,727, 5,258,498).

[0445] For example, the anti-C5 antibody is pexelizumab or a variant thereof. Pexelizumab is a 25 kDa recombinant, humanized single-chain (scFv) antibody that binds to human C5 (Fitch et al. (1999) Circulation, 100:2499-506; U.S. Pat. No. 6,355,245). Pexelizumab has the sequence of amino acids set forth in SEQ ID NO:46, and contains: an antibody light chain variable region (amino acids 1-107 of SEQ ID NO:46); two amino acids of an immunoglobulin light chain constant region (amino acids 108 and 109); a flexible peptide linker (amino acids 110-124 of SEQ ID NO:46); and an antibody heavy chain variable region (amino acids 125-247 of SEQ ID NO:46). A variant of pexelizumab is also known, set forth in SEQ ID NO:47, that differs from the amino acid sequence of pexelizumab by two amino acids, and that exhibits a change in its isoelectric point (pI) and an increase in solubility (see US2013/0273052). For example, the variant single chain antibody does not contain an amino terminal alanine that is present in pexelizumab. The variant antibody also contains a substitution of the arginine (R) at position 38 of pexelizumab for glutamine (Q).

[0446] Other C5 binding molecules are known in the art, and include single-chain variable fragments (scFV), minibodies and aptamers targeting C5. These C5 inhibitors can bind to different sites (epitopes) on the C5 molecule and may have different modes of action. For example, whereas Eculizumab interacts with C5 at some distance of the convertase cleavage site, the minibody MB12/22 (Mubodina®) interacts with the cleavage site of C5. In contrast to the proteins that inhibit cleavage of C5, the monoclonal antibody TNX-558 binds to a C5a epitope present both on intact C5 and released C5a without inhibiting the cleavage of C5. (Fung et al. (2003) Clin Exp Immunol 133 (2): 160-169).

[0447] For example, among other antibodies that are immunoreactive against C5 alpha chain include antibodies described in U.S. Pat. No. 7,999,081. In particular, among anti-C5 antibodies or antigen-binding fragments in the combinations and compositions provided herein for use in adjunct therapy with an oncolytic virus include antibodies that bind at a C5 epitope KDMQLGRLHM KTLLPVSK (SEQ ID NO:49), which corresponds to the epitope on the alpha chain of the C5 component that contains the cleavage region of C5 convertase. Such antibodies include, but are not limited to, TS-A12/22 or MB12/22. The antibodies can include a variable light chain set forth in SEQ ID NO:50 and a variable heavy chain set forth in SEQ ID NO:51. The antibody can be a full-length antibody or a fragment thereof, such as any described above. For example, the antibody is a scFv containing the heavy chain and light chain covalently linked by a linker (e.g. TSAl2-22 set forth in SEQ ID NO:52). MB12/22 is the TSAl2-22 antibody that is dimerized by means of rat CH2 CH3 domains.

### E. ADJUNCT THERAPY WITH LIPIDS AND LIPID EMULSIONS

[0448] Provided herein are compositions and combinations that contain an oncolytic virus, such as a vaccinia virus, and a lipid component. Generally, the lipid is a biocompatible lipid. The lipid is typically a hydrophobic lipid, such as a fatty acid or fatty acid derivative. The lipid can be a natural or synthetic lipid. In particular, the lipid component contains a triglyceride, diglyceride, monoglyceride, phospholipid or mixtures thereof. Typically, the lipid component contains triglycerides (or triacylglycerols or triacylglycerides), which are glycerides in which the glycerol backbone is esterified with three fatty acids. Fatty acids are long-chain monocarboxylic acids that can either be saturated (i.e., without double bonds) or mono- or poly-unsaturated. Saturated fatty acids have the general structure of CH₃(CH₂)ₙCOOH, where n (i.e., the length of the carbon chain) generally ranges from 12 to 24 carbons, with an even number of carbons. The presence of double bonds in the carbon chain, i.e., an unsaturated fatty acid, functions to reduce the melting point of the fatty acid, and thus the triglyceride.

[0449] Triglycerides can be characterized by their fatty acid content, based upon the chain length of the fatty acids. Triglycerides are generally classified as short-chain triglycerides (less than 6 carbon atoms), medium-chain triglycerides (6-10 carbon atoms), or long-chain triglycerides (greater than 14 carbon atoms). For example, the lipid component contains a fatty acid that is a long-chain triglyceride, including but not limited to, linoleate, oleate, palmitate, linolenate, or stearate. In other examples, the lipid component contains a fatty acid that is a medium-chain triglyceride (MCT), such as caprylic acid or capric acid. Long-chain triglycerides can also include omega-3 and omega-6 fatty acids, whereas medium-chain triglycerides have saturated fatty acids and thus do not contain omega-3 or omega-6 fatty acids.

[0450] Generally, a lipid component that is biocompatible is employed. For example, the lipid component is from a plant oil, vegetable oil, animal oil, fish oil, mineral oil, other chemically synthesized oil that is biocompatible, or mixtures thereof. Exemplary lipid components are described further below or are known in the art. For example, the lipid component is from soybean oil, cottonseed oil, safflower oil, corn oil, coconut oil, sesame oil, peanut oil, olive oil, castor oil or mixtures thereof.

[0451] Typically, the lipid component is provided as a lipid emulsion. Lipid emulsions are a heterogeneous system where the lipid phase (or oil phase) is dispersed as droplets in an aqueous phase (e.g., water) and is stabilized by an emulsifying agent. Hence, lipid emulsions generally contain a lipid, an emulsifier, and an aqueous phase. Emulsifiers, such as a phospholipid, stabilize emulsions by reducing the interfacial tension of the system and by providing enough surface charge for droplet-droplet repulsion. Lipid emulsions also can optionally contain other components.

[0452] Lipid (i.e., fat) emulsions include those that are injectables commonly formulated for intravenous use as a component of parenteral nutrition therapy, also called injectable or intravenous lipid emulsions (ILE). ILEs generally include a tonicity modifier (e.g., glycerol, also called glycerine or glycerin), for example, to adjust the emulsion so that it is isotonic with blood. The lipid emulsions provide the main source of fuel calories and essential fatty acids to patients who require parenteral nutrition. Soybean oil, a LCT, is frequently used in lipid emulsions for intravenous therapeutic uses as an important source of the essential free fatty acids linolenate and linoleate (Driscoll (2006) Nutr. Clin. Pract. 21:381-386). More recently, ILEs have been used as a vehicle for delivery of highly lipid-soluble drugs such as propofol, paclitaxel, etomidate, and diazepam. ILEs have also been used to treat local anesthetic system toxicity and show promise as an effective antidote for other lipophilic drug poisonings (Rothschild et al. (2010) Scan. J. Trauma Resus. Emerg. Med. 18:51).

[0453] Exemplary of ILEs are emulsions of soybean, sesame or safflower oil (e.g., 10-30%) emulsified with egg lecithin containing 60-70% phosphatidylcholine and containing glycerol (i.e., glycerin). For example, Intralipid® lipid emulsion (10%, 20%, 30% fat emulsion) contains 10%-30% soybean oil, respectively, and also contains 1.2% egg yolk phospholipids, 2.25% glycerin and water for injection, and adjusted to a pH of 6 to 8.9 using sodium hydroxide. For example, among the fatty acids in the soybean oil fat emulsion are linoleic (44-62%), oleic (19-30%), palmitic (7-14%), linolenic (4-11%) and stearic (1.4-5.5%). Other lipid emulsions are known in the art, and also are described below.

[0454] The lipid emulsion generally is formulated with the oncolytic virus resulting in a lipid-treated oncolytic virus, including lipid-treated oncolytic virus compositions that are emulsions. In other cases, the oncolytic virus can be provided in combination with a lipid emulsion for co-administration of the lipid emulsion prior to, simultaneously, intermittently or subsequent from the oncolytic virus. Generally, when the lipid emulsion is provided in combination with an oncolytic virus, and separately formulated from an oncolytic virus, the concentration of lipid emulsion required to increase virus infectivity is about or at least 3-fold, 4-fold, 5-fold, 6-fold, 7-fold, 8-fold, 9-fold, 10-fold, 50-fold, 100-fold or higher than when the lipid is present with the pretreated virus.

[0455] The lipid emulsions provided herein can be used in combinations and compositions with an oncolytic virus, such as a vaccinia virus. The lipid emulsion can be used, for example, in adjunct therapy with an oncolytic virus, e.g., a vaccinia virus, alone, or can be used in conjunction with a complement inhibitor, such as an anti-C5 antibody, e.g., eculizumab.

[0456] The combinations and compositions provided herein, i.e., combinations and compositions containing a therapeutic virus, e.g., a vaccinia virus, a lipid emulsion, and, optionally, an anti-C5 antibody, e.g., eculizumab, maintain the infectivity and bioactivity of the therapeutic virus after exposure to blood, for example, after administration into the body. For example, administration of the compositions and combinations provided herein, i.e., compositions and combinations containing a therapeutic virus, such as a vaccinia virus, a lipid emulsion, such as a lipid emulsion that contains long-chain triglycerides, medium-chain triglycerides, oils of marine origin, i.e., fish oils, synthetic lipids, or mixtures thereof, and, optionally, an anti-C5 antibody, can result in a reduction or elimination of complement-mediated inactivation of the therapeutic virus.

[0457] Combinations and compositions of an oncolytic virus and a lipid emulsion exhibit increased virus infectivity compared to an oncolytic virus in the absence of a lip component or lipid emulsion, for example, upon administration or exposure to a bodily fluid (e.g., serum). For example, combinations and compositions containing an oncolytic virus and lipid component, such as a lipid emulsion, exhibits at least 1.2-fold, 1.3-fold, 1.4-fold, 1.5-fold, 1.6-fold, 1.7-fold, 1.8-fold, 1.9-fold, 2.0-fold, 2.5-fold, 3-fold, 4-fold, 5-fold, 10-fold or more increased infectivity compared to the infectivity of the virus that is not formulated with lipids as an emulsion. In some examples, a lipid-emulsion oncolytic virus exhibits increased virus titer after exposure of the virus to bodily fluid for a predetermined time (e.g., virus titer AUC or total virus recovery) by at least 1.2-fold, 1.3-fold, 1.4-fold, 1.5-fold, 1.6-fold, 1.7-fold, 1.8-fold, 1.9-fold, 2.0-fold, 2.5-fold, 3-fold, 4-fold, 5-fold or more compared to the virus titer of the same oncolytic virus that is not formulated with lipids as an emulsion. The predetermined time can be 1 minute to 12 hours, and generally is 1 minute to 2 hours, 1 minute to 1 hour, 1 minute to 30 minutes, for example, at least 2 minutes, 5 minutes, 10 minutes, 15 minutes, 20 minutes, 30 minutes, 40 minutes, 50 minutes, 60 minutes, 70 minutes, 80 minutes, 90 minutes, 100 minutes, 110 minutes, 120 minutes or more. In other examples, a lipid-emulsion oncolytic virus exhibits increased half-life in a bodily fluid (e.g., serum) by at least 1.2-fold, 1.3-fold, 1.4-fold, 1.5-fold, 1.6-fold, 1.7-fold, 1.8-fold, 1.9-fold, 2.0-fold, 2.5-fold, 3-fold, 4-fold, 5-fold or more compared to the half-life of the same oncolytic virus in the same bodily fluid (e.g., serum) that is not formulated with lipids as an emulsion.

[0458] The combinations and compositions (e.g. lipid-treated virus) provided herein containing an oncolytic virus and a lipid component, such as a lipid emulsion, also can be employed in an adjunct therapy or combination therapy with another agent. The other agent can be a therapeutic agent for treating a hyperproliferative disease or disorder or can be an agent that increases the infectivity of the virus. Exemplary of such other agents for use in adjunct therapy or combination therapy are described herein. In particular examples, a lipid-treated virus is co-administered in an adjunct therapy with a complement inhibitor (e.g., anti-C5 antibody, such as eculizumab) that itself also increases virus infectivity.

[0459] 1. Components of Lipid Emulsions

[0460] Lipid emulsions are heterogeneous systems in which the lipid phase (e.g., fat) is dispersed as droplets in an aqueous phase and stabilized by an emulsifying agent. Hence, prepared lipid emulsions typically contain a lipid component, an emulsifier and an aqueous phase. Injectable lipid emulsions (ILEs) are known that generally also contain a tonicity modifier. Lipid emulsions can be prepared by any method known to those of skill in the art, for example, gentle shaking, agitation, or sonication. The components of the emulsion can be mixed or pre-mixed in any order prior to the preparation process, e.g., gentle shaking, agitation, or sonication. The size of the particles of the prepared emulsion can be in the range of from at or about 0.25 microns to at or about 0.75 microns in diameter, for example, the size of the particles can be at or about 0.25, 0.3, 0.35, 0.4, 0.45, 0.5, 0.55, 0.6, 0.65, 0.7, or 0.75 microns in diameter. In one example, the size of the particles of the prepared emulsion is at or about 0.5 microns in diameter.

[0461] The components of lipid emulsions (e.g., ILE) are described below. Any virus described in Section C above can be provided in combination or as a composition (e.g. lipid-treated virus or virus emulsion). Typically, the virus is a vaccinia virus, such as a Copenhagen, WR or Lister (e.g., LIVP) virus strain or recombinant or modified form thereof.

[0462] a. Lipid Component

[0463] Lipid emulsions (e.g., ILE) contain a lipid component that is any lipid that is soluble in hydrocarbons and insoluble in water, i.e., any hydrophobic lipid. Suitable lipids include fatty acids and their derivatives, including, but not limited to, triglycerides, diglycerides, monoglycerides, and phospholipids. Generally, the lipid component in the lipid emulsions provided herein is a biocompatible lipid, such as a naturally occurring plant or vegetable oil, including, but not limited to, soybean oil, cottonseed oil, safflower oil, corn oil, coconut oil, sesame oil, peanut oil, olive oil, castor oil, and mixtures thereof. The lipid component can also be an animal oil; fish oil; for example, cod liver oil; mineral oil; chemically synthesized oil, for example, 2-linoleoyl-1,3-dioctanoyl glycerol; or a semi-synthetic mono-, di- or triglyceride, for example, rac-glyceryl-1-monopalmitic, acyl glyceryl-1-monoolein, 1,2-dipalmitic, 1,3-dipalmitic, trimyristin, tripalmitin, tristearin, triolein, trilaiden and the like. Exemplary lipid components used in the emulsions provided herein are soybean oils. For example, an exemplary soybean oil-containing lipid emulsion is Intralipid®, a soybean oil-in-water emulsion containing egg yolk phospholipids and glycerin that contains 10%, 20%, or 30% soybean oil.

[0464] In lipid emulsions, such as ILE, the lipid component is typically present in an amount as a percentage (%) by weight, of the lipid emulsion (wt %), for example, from at or about 2% to at or about 40%, such as 2% to 5%, 2% to 10%, 2% to 15%, 2% to 20%, 2% to 25%, 2% to 30%, 2% to 35%, 2% to 40%, 5% to 10%, 5% to 15%, 5% to 20%, 5% to 25%, 5% to 30%, 5% to 35%, 5% to 40%, 10% to 15%, 10% to 20%, 10% to 25%, 10% to 30%, 10% to 35%, 10% to 40%, 15% to 20%, 15% to 25%, 15% to 30%, 15% to 35%, 15% to 40%, 20% to 25%, 20% to 30%, 20% to 35%, 20% to 40%, 25% to 30%, 25% to 35%, 25% to 40%, 30% to 35%, 30% to 40%, and 35% to 40%, by weight, of the lipid emulsion. Exemplary concentrations of the lipid component in the lipid emulsion are at or about 2%, 5%, 10%, 15%, 20%, 25%, 30%, 35%, and 40% (wt %) of the lipid emulsion. In one example, the lipid component is soybean oil and is present in an amount of at or about 20% by weight, of the lipid emulsion. In another example, the lipid component is soybean oil and is present in an amount of at or about 10% by weight, of the lipid emulsion. In yet another example, the lipid component is soybean oil and is present in an amount of at or about 30% by weight, of the lipid emulsion.

[0465] b. Emulsifiers

[0466] Lipid emulsions (e.g., ILE) include one or more emulsifiers that stabilize the emulsion by reducing the interfacial tension of the system and by providing enough surface charge for droplet-droplet repulsion. Typically, the emulsifier is a biocompatible emulsifier, such as a naturally-occurring emulsifier, for example, a naturally-occurring phospholipid, such as those derived from egg or soy sources. Suitable emulsifiers include, but are not limited to, egg yolk phospholipids, hydrogenated egg yolk phospholipids, soybean phospholipids, hydrogenated soybean phospholipids, and mixtures thereof. The choice of emulsifier can depend upon the desired application.

[0467] In particular, the emulsifier is natural lecithin obtained from egg yolk. Lecithin is biocompatible, nontoxic and is metabolized like natural fat. The emulsifier can also be a synthetic lecithin, such as dihexanoyl-L-α-lecithin. Other emulsifiers can include polyethylene glycol (PEG) lipids, such as polyethylene glycol-modified phosphatidylethanolamine (PEG-PE), non-ionic surfactants, such as Pluronic® F68, and other glycerophospholipids, such as phosphatidylcholine lipids, e.g., cholesterol, stearylamine, phosphatidylserine, and phosphatidylglycerol, and any hydrogenated derivatives. Exemplary emulsifiers used in the lipid emulsions provided herein are egg yolk phospholipids, which contains egg lecithin.

[0468] In lipid emulsions, such as ILE, the emulsifier is typically present in an amount as a percentage (%) by weight, of the lipid emulsion (wt %), for example, from at or about 0.2% to at or about 5%, such as 0.2% to 0.5%, 0.2% to 1%, 0.2% to 1.5%, 0.2% to 2%, 0.2% to 2.5%, 0.2% to 3%, 0.2% to 3.5%, 0.2% to 4%, 0.2% to 4.5%, 0.2% to 5%, 0.5% to 1%, 0.5% to 1.5%, 0.5% to 2%, 0.5% to 2.5%, 0.5% to 3%, 0.5% to 3.5%, 0.5% to 4%, 0.5% to 4.5%, 0.5% to 5%, 1% to 1.5%, 1% to 2%, 1% to 2.5%, 1% to 3%, 1% to 3.5%, 1% to 4%, 1% to 4.5%, 1% to 5%, 1.5% to 2%, 1.5% to 2.5%, 1.5% to 3%, 1.5% to 3.5%, 1.5% to 4%, 1.5% to 4.5%, 1.5% to 5%, 2% to 2.5%, 2% to 3%, 2% to 3.5%, 2% to 4%, 2% to 4.5%, 2% to 5%, 2.5% to 3%, 2.5% to 3.5%, 2.5% to 4%, 2.5% to 4.5%, 2.5% to 5%, 3% to 3.5%, 3% to 4%, 3% to 4.5%, 3% to 5%, 3.5% to 4%, 3.5% to 4.5%, 3.5% to 5%, 4% to 4.5%, 4% to 5%, and 4.5% to 5%, by weight, of the lipid emulsion. Exemplary concentrations of the emulsifier in the lipid emulsion are at or about 0.2%, 0.5%, 1%, 1.2%, 1.5%, 2%, 2.5%, 3%, 3.5%, 4%, 4.5% and 5% (wt %) of the lipid emulsion. In one example, the emulsifier is an egg yolk phospholipid and is present in an amount of at or about 1.2% by weight, of the lipid emulsion.

[0469] c. Aqueous Phase

[0470] Lipid emulsions (e.g., ILE) include an aqueous phase that typically is water. Typically, the amount of aqueous phase, e.g., water, is determined by the amount of water needed to achieve the final desired lipid concentration.

[0471] In lipid emulsions, such as ILE, the amount of aqueous phase, e.g., water, in the emulsions provided herein is typically present in an amount as a percentage (%) by weight, of the lipid emulsion (wt %), for example, from at or about 50% to at or about 98%, such as 50% to 55%, 50% to 60%, 50% to 65%, 50% to 70%, 50% to 75%, 50% to 80%, 50% to 85%, 50% to 90%, 50% to 95%, 50% to 98%, 55% to 60%, 55% to 65%, 55% to 70%, 55% to 75%, 55% to 80%, 55% to 85%, 55% to 90%, 55% to 95%, 55% to 98%, 60% to 65%, 60% to 70%, 60% to 75%, 60% to 80%, 60% to 85%, 60% to 90%, 60% to 95%, 60% to 99%, 65% to 70%, 65% to 75%, 65% to 80%, 65% to 85%, 65% to 90%, 65% to 95%, 65% to 98%, 70% to 75%, 70% to 80%, 70% to 85%, 70% to 90%, 70% to 95%, 70% to 99%, 75% to 80%, 75% to 85%, 75% to 90%, 75% to 95%, 75% to 98%, 80% to 85%, 80% to 90%, 80% to 95%, 80% to 98%, 85% to 90%, 85% to 95%, 85% to 98%, 90% to 95%, 90% to 98%, and 95% to 98%, by weight, of the lipid emulsion. Exemplary concentrations of the aqueous phase, e.g., water, in the lipid emulsion are at or about 50%, 55%, 60%, 65%, 70%, 75%, 80%, 85%, 90%, 95% and 98% (wt %) of the lipid emulsion. In one example, the aqueous phase is water and is present in an amount of at or about 80% by weight, of the lipid emulsion.

[0472] d. Additional Ingredients

[0473] Lipid emulsions (e.g., ILE) can also include one or more additional ingredients, for example, additives that can aid in the formulation of the emulsion or in the preservation of the emulsion during storage.

[0474] For example, the emulsions can contain a tonicity modifier. In particular, ILEs are lipid emulsions that are formulated for intravenous administration and contain a tonicity modifier so that the emulsion is isotonic with the blood and can be administered systemically. The tonicity modifier can include, but is not limited to, glycerin (i.e., glycerol or glycerine), sodium chloride, potassium chloride, mannitol, sucrose, lactose, fructose, maltose, dextrose, dextrose anhydrous, xylitol, sorbitol, propylene glycol, polyoxyethylated hydrocarbons, and C₆-C₂₀ saturated or unsaturated aliphatic acids. An exemplary tonicity modifier used in the lipid emulsions is glycerin.

[0475] In lipid emulsions, such as ILE, the tonicity modifier is typically present in an amount as a percentage (%) by weight, of the lipid emulsion (wt %), for example, from at or about 0.2% to at or about 5%, such as 0.2% to 0.5%, 0.2% to 1%, 0.2% to 1.5%, 0.2% to 2%, 0.2% to 2.5%, 0.2% to 3%, 0.2% to 3.5%, 0.2% to 4%, 0.2% to 4.5%, 0.2% to 5%, 0.5% to 1%, 0.5% to 1.5%, 0.5% to 2%, 0.5% to 2.5%, 0.5% to 3%, 0.5% to 3.5%, 0.5% to 4%, 0.5% to 4.5%, 0.5% to 5%, 1% to 1.5%, 1% to 2%, 1% to 2.5%, 1% to 3%, 1% to 3.5%, 1% to 4%, 1% to 4.5%, 1% to 5%, 1.5% to 2%, 1.5% to 2.5%, 1.5% to 3%, 1.5% to 3.5%, 1.5% to 4%, 1.5% to 4.5%, 1.5% to 5%, 2% to 2.5%, 2% to 3%, 2% to 3.5%, 2% to 4%, 2% to 4.5%, 2% to 5%, 2.5% to 3%, 2.5% to 3.5%, 2.5% to 4%, 2.5% to 4.5%, 2.5% to 5%, 3% to 3.5%, 3% to 4%, 3% to 4.5%, 3% to 5%, 3.5% to 4%, 3.5% to 4.5%, 3.5% to 5%, 4% to 4.5%, 4% to 5%, and 4.5% to 5%, by weight, of the lipid emulsion. Exemplary concentrations of the tonicity modifier in the lipid emulsion are at or about 0.2%, 0.5%, 1%, 1.5%, 2%, 2.25%, 2.5%, 3%, 3.5%, 4%, 4.5% and 5% (wt %) of the lipid emulsion. In one example, the tonicity modifier is glycerin and is present in an amount of at or about 2.25% by weight, of the lipid emulsion.

[0476] pH adjusters, for example, sodium hydroxide, can be used to adjust the pH of the system to around 8.0 before sterilization. For lipid emulsions, such as ILE, a slightly alkaline pH is preferred because the pH will decrease during sterilization and storage due to the production of free fatty acids. Other additional ingredients can include, for example, stabilizing agents, e.g., carbohydrates, amino acids, and polysorbates, such as 5% dextrose; solubilizing agents, e.g., cetrimide, sodium docusate, glyceryl monooleate, polyvinylpyrolidone (PVP), and polyethylene glycol (PEG); buffers, e.g., acetates, citrates, phosphate, tartrates, lactates, succinates, and amino acids; preservatives, e.g., butylated hydroxyanisole (BHA), butylated hydroxytoluene (BHT), gentisic acids, vitamin E, ascorbic acid, sodium ascorbate, and sulfur-containing agents such as sulfites, bisulfites, metabisulfites, thioglycerols, and thioglycolates; antioxidants, e.g., α-tocopherol, ascorbic acid, and deferoxamine mesylate; suspending or viscosity agents; chelating agents; surfactants; co-solvents; bacteriostats or antimicrobial agents, e.g., EDTA, sodium benzoate and benzyl alcohol; active ingredients; adsorbents; and mixtures thereof.

[0477] 2. Exemplary Injectable Lipid Emulsions (ILE)

[0478] Injectable (also called intravenous) lipid emulsions (ILE) are well known in the art (see e.g., Hippalgaonkar et al. (2010) AAPS PharmSciTech, 11:1526), and any can be used to prepare combinations or compositions with an oncolytic virus as provided herein. ILEs contain a lipid component, an emulsifier, a tonicity modifier and an aqueous phase. The tonicity modifier typically is glycerin, but can also include sorbitol, xylitol, mannitol, dextrose, glucose, polyethylene glycol, propylene glycol, sucrose, or lactose or other tonicity modifier. The ILE can be classified by the type of lipid in the emulsion. ILEs include those that contain a long-chain triglyceride (LCT) emulsion that contains only LCTs as the lipid component, a medium-chain triglyceride emulsion that contains only MCTs as the lipid component, a fish oil emulsion that contains only fish oil as the lipid component, or a lipid emulsion that contains a mixture of one or more of LCTs, MCTs and fish oils. In some examples, ILEs can be classified as a synthetic lipid emulsion. Exemplary lipid emulsions that fall into these categories are described below.

[0479] a. Long-Chain Triglyceride (LCT) Emulsions

[0480] ILEs can contain long-chain triglycerides (LCTs), i.e., triglycerides with fatty acid chains of more than 14 carbons. Typical formulations contain LCT concentrations ranging from 10-30%. The LCTs contain free fatty acids such as linoleate, oleate, palmitate, linolenate, and stearate. LCT lipid emulsions are most commonly made from soybean oil, but other oils containing LCTs include, but are not limited to, almond oil, canola oil, corn oil, cottonseed oil, flaxseed oil, grape seed oil, olive oil, palm oil, peanut oil, safflower oil, sesame oil, sunflower oil, and walnut oil.

[0481] Typically, LCT lipid emulsions contain soybean oil, which is a good source of the essential free fatty acids linolenate and linoleate. For example, approximately 60% of the total fatty acids in soybean oil are polyunsaturated fatty acids (PUFAs), with a ratio of linoleic acid (n-6) to α-linolenic acid (n-3) of approximately 8:1. An exemplary soybean oil emulsion is Intralipid®, a soybean oil-in-water emulsion containing egg yolk phospholipids (1.2%) and glycerin (2.25%) that is approved for human use. Intralipid® is available in 10%, 20% and 30% (soybean oil) concentrations. The final pH of Intralipid® is adjusted to 8.0 with sodium hydroxide. The role that soybean oil emulsions, e.g., Intralipid®, play in inflammation is unknown, though Intralipid® has been shown to inhibit the in vitro synthesis and secretion of the second (C2) and fourth (C4) components of complement by guinea pig peritoneal macrophages (Strunk et al. (1979) Pediatr. Res. 13:188-193).

[0482] Other ILEs containing LCTs from soybean oil include commercially available lipid emulsions, including, but not limited to, Elolipid® 20% (Fresenius Kabi, Bad Homburg, Germany), Mixid® (Otsuka Pharmaceutical Factory, Inc., Tokushima, Japan), Liposyn III® (Hospira, Inc., Lake Forest, Ill.), Ivelip® 10% (Baxter Healthcare Ltd., Auckland, Australia), Ivelip® 20% (Baxter Healthcare Ltd., Auckland, Australia), Endolipid® 10% (B. Braun AG, Melsungen, Germany), and Endolipid® 20% (B. Braun AG, Melsungen, Germany), and any other commercially available soybean oil-containing lipid emulsion.

[0483] Emulsions that contain safflower oil are also known. These emulsions have more linoleic acids and less saturated fatty acids as compared to soybean oil. An exemplary safflower oil emulsion approved for human use is Liposyn®, a safflower oil-in-water emulsion that contains egg phosphatides and glycerin. Liposyn® and Intralipid® differ in their fatty acid composition, the major difference being in the α-linolenic acid content, a precursor to n-3 fatty acids, with Liposyn® containing 8% whereas Intralipid® contains 0.5%.

[0484] ILEs also include lipid emulsions containing a mixture of LCTs. For example, the lipid emulsion can contain a mixture of soybean oil and safflower oil. An exemplary lipid emulsion that contains a mixture of soybean oil and safflower oil is Liposyn II® (Hospira, Inc., Lake Forest, Ill.), available in both a 10% and 20% concentration, where the amounts of soybean oil and safflower oil are equal in each composition. In another example, the lipid emulsion can contain a mixture of olive oil and soybean oil. These emulsions have a high content of monounsaturated oleic acid and vitamin E (α-tocopherol), with a ratio of approximately 9:1 linoleic acid (n-6) to α-linoleic acid (n-3). An exemplary lipid emulsion that contains a mixture of olive oil and soybean oil is ClinOleic® 20% (Baxter, Maurepas, France). ClinOleic® 20% contains approximate 80% olive oil and approximately 20% soybean oil, along with egg lecithin, glycerol and sodium oleate.

[0485] In one example, the lipid emulsion contains either 10%, 20% or 30% of a long-chain triglyceride, for example, soybean oil, 1.2% egg phospholipids, and 2.25%-2.5% glycerol. In another example, the lipid emulsion contains 10% or 20% of a long-chain triglyceride, for example, safflower oil, 1.2% egg phospholipids, and 2.25%-2.5% glycerol. In yet another example, the lipid emulsion contains a mixture of LCTs, for example, 5% soybean oil and 5% safflower oil, 10% soybean oil and 10% safflower oil, or 16% olive oil and 4% soybean oil, and 1.2% egg phospholipids, and 2.25%-2.5% glycerol.

[0486] Table 8 below provides a list of commercially available LCT lipid emulsions and the corresponding lipid component(s). The lipid emulsions listed in Table 8 and any other known lipid emulsions that contain LCTs can be used in the compositions and combinations provided herein.

TABLE 8
Long-chain triglyceride (LCT) lipid emulsions

| Lipid | | | Tonicity |
|---|---|---|---|
| emulsion | Lipid component | Emulsifier | modifier |
| Intralipid ® 10% | Soybean oil (10%) | Egg | Glycerol |
| | | phospholipid | (2.25%) |
| | | (1.2%) | |
| Intralipid ® 20% | Soybean oil (20%) | Egg | Glycerol |
| | | phospholipid | (2.25%) |
| | | (1.2%) | |
| Intralipid ® 30% | Soybean oil (30%) | Egg | Glycerol |
| | | phospholipid | (2.25%) |
| | | (1.2%) | |
| Elolipid ® | Soybean oil (20%) | Egg | Glycerol |
| | | phospholipid | (2.5%) |
| | | (1.2%) | |
| Liposyn III ® 10% | Soybean oil (10%) | Egg | Glycerol |
| | | phospholipid | (2.5%) |
| | | (1.2%) | |
| Liposyn III ® 20% | Soybean oil (20%) | Egg | Glycerol |
| | | phospholipid | (2.5%) |
| | | (1.2%) | |
| Ivelip ® 10% | Soybean oil (10%) | Egg | Glycerol |
| | | phospholipid | (2.5%) |
| | | (1.2%) | |
| Ivelip ® 20% | Soybean oil (20%) | Egg | Glycerol |
| | | phospholipid | (2.5%) |
| | | (1.2%) | |
| Endolipid ® 10% | Soybean oil (10%) | Egg | Glycerol |
| | | phospholipid | (2.5%) |
| | | (1.2%) | |
| Endolipid ® 20% | Soybean oil (20%) | Egg | Glycerol |
| | | phospholipid | (2.5%) |
| | | (1.2%) | |
| Liposyn ® 10% | Safflower oil (10%) | Egg | Glycerol |
| | | phospholipid | (2.5%) |
| | | (1.2%) | |
| Liposyn ® 20% | Safflower oil (20%) | Egg | Glycerol |
| | | phospholipid | (2.5%) |
| | | (1.2%) | |
| Liposyn II ® 10% | Soybean oil (5%), | Egg | Glycerol |
| | safflower oil (5%) | phospholipid | (2.5%) |
| | | (1.2%) | |
| Liposyn II ® 20% | Soybean oil (10%), | Egg | Glycerol |
| | safflower oil (10%) | phospholipid | (2.5%) |
| | | (1.2%) | |
| ClinOleic ® 20% | Olive oil (16%), | Egg | Glycerol |
| | soybean oil (4%) | phospholipid | (2.25%) |
| | | (1.2%) | |

[0487] b. Medium-Chain Triglyceride (MCT) Emulsions

[0488] ILEs also include medium-chain triglyceride (MCT) emulsions that contain triglycerides with fatty acid chains of between 6 and 10 carbons. The MCTs found in the lipid emulsions are generally caprylic acid (C8) and capric acid (C10). These fatty acids are saturated and typically are found in coconut oil, for example, fractionated coconut oil, and also palm kernel oils. MCTs are typically used in combination with LCTs because MCTs are not a source of essential fatty acids. MCT lipid emulsions include those that are composed of a mixture of caprylic and capric triglycerides. For example, commercially available MCT lipid emulsions that contain a mixture of caprylic and capric triglycerides include, but are not limited to Miglyol® 810 (Sasol Olefins & Surfactants GmbH, Hamburg, Germany), Miglyol® 812 (Sasol Olefins & Surfactants GmbH, Hamburg, Germany), Miglyol® 818 (Sasol Olefins & Surfactants GmbH, Hamburg, Germany), Neobee® M5 (Stepan Specialty Products, LLC, Maywood, N.J.), Captex® 300 (Abitec Corp., Columbus, Ohio), and any other commercially available MCT-containing lipid emulsion.

[0489] Table 9 below provides a list of commercially available MCT lipid emulsions and the corresponding lipid component. The lipid emulsions listed in Table 9 and any other known lipid emulsions that contain MCTs can be used in the compositions and combinations provided herein.

TABLE 9
Medium-chain triglyceride (MCT) lipid emulsions

| Lipid | | | Tonicity |
|---|---|---|---|
| emulsion | Lipid component | Emulsifier | modifier |
| Miglyol ® 810 | Caprylic acid (65-80%), | Egg | Glycerol |
| | capric acid (20-35%), | phospholipid | (2.25%) |
| | caproic acid (<2%), | (1.2%) | |
| | lauric acid (<2%), | | |
| | myristic acid (<1%) | | |
| Miglyol ® 812 | Caprylic acid (50-65%), | Egg | Glycerol |
| | capric acid (30-45%), | phospholipid | (2.25%) |
| | caproic acid (<2%), | (1.2%) | |
| | lauric acid (<2%), | | |
| | myristic acid (<1%) | | |
| Miglyol ® 818 | Caprylic acid (45-65%), | Egg | Glycerol |
| | capric acid (30-45%), | phospholipid | (2.25%) |
| | caproic acid (<2%), | (1.2%) | |
| | lauric acid (<3%), | | |
| | myristic acid (<1%), | | |
| | linoleic acid (2-5%) | | |

[0490] c. Fish Oil Emulsions

[0491] ILEs based on fish oil are also available. Triglycerides typical of fish oils are those triglycerides that have a high concentration of omega-3 fatty acids, for example, higher than 30%. Omega-3 fatty acids are hydrolyzed much more slowly than LCTs, which are in turn hydrolyzed much more slowly than MCTs. The high unsaturated fatty acid content of fish oil emulsions can reduce the generation of pro-inflammatory lipid mediators, such as TNF-α, IL1, IL6 and IL8 from monocytes (Mayer et al. (2003) J. Immunol 171(9):4837-4843). These emulsions are designed to provide essential omega-3 PUFAs and also function to prevent elevated omega-6 to omega-3 PUFA ratios in cell membranes, which can occur after administration of LCT lipid emulsions, e.g., soybean oil emulsions, that are high in potentially inflammatory omega-6 PUFAs (Waitzberg et al. (2006) J. Parenter. Enteral. Nutr. 30:351-367). The potential anti-inflammatory effects of fish oil emulsions are shown to be influenced by the ratio of omega-3 to omega-6 PUFAs (Hagi et al. (2010) J. Parenter. Enteral. Nutr. 34:263-270).

[0492] Fish oil emulsions can include fish oils from, for example, any cold-water fish, including, but not limited to, salmon, sardine, mackerel, herring, anchovy, smelt and swordfish. Fish oil lipid emulsions can be composed of fish oil alone, but are typically formulated as a mixture of fish oil and other oils, such as LCTs, e.g., soybean oil, olive oil, of safflower oil, or emulsions rich in MCTs, e.g., coconut oil. An exemplary fish oil emulsion with fish oil as the only lipid component is Omegaven® (Fresenius Kabi GmbH, Bad Homburg, Germany), which contains highly refined fish oil, along with glycerol and egg lecithin.

[0493] Table 10 below provides a list of commercially available fish oil lipid emulsions and the corresponding lipid component. The lipid emulsion listed in Table 10 and any other known fish oil lipid emulsions can be used in the compositions and combinations provided herein.

TABLE 10
Fish oil lipid emulsions

| Lipid | | | Tonicity |
|---|---|---|---|
| emulsion | Lipid component | Emulsifier | modifier |
| Omegaven ® | Fish oil (10%) | Egg | Glycerol |
| | | phospholipid | (2.5%) |
| | | (1.2%) | |

[0494] d. Mixtures of LCTs, MCTs and Fish Oils

[0495] Lipid emulsions have been developed that contain mixtures of LCTs, MCTs and/or fish oils. These emulsions can provide both rapid and slowly metabolized fuels as well as essential fatty acids. For example, a lipid emulsion can contain a mixture of LCTs and MCTs, such as a 50:50 mixture of LCTs and MCTs. Suitable lipid emulsions can also contain mixtures of one or more LCTs, MCTs, and fish oil, for example, an emulsion that contains soybean oil, olive oil, MCTs and fish oil, or an emulsion that contains soybean oil, MCTs and fish oil. ILEs include lipid emulsions that include mixtures of MCTs and fish oil.

[0496] Suitable lipid emulsions that contain a mixture of lipids include emulsions with a mixture of LCTs and MCTs. For example, mixtures of a LCT, e.g., soybean oil, and a MCT, e.g., coconut oil, are known. These emulsions can be composed of an equal mixture of soybean oil and a MCT such as coconut oil and supply half of the PUFA as compared to the emulsions containing 100% soybean oil, with a similar ratio of approximately 8:1 of linoleic acid (n-6) to α-linoleic acid (n-3). Exemplary emulsions that contain equal parts LCT and MCT are Lipofundin® MCT/LCT 10% and Lipofundin® MCT/LCT 20% (B. Braun, Inc., Melsungen, Germany).

[0497] ILEs also include lipid emulsions that contain a mixture of LCTs, MCTs and fish oil. For example, a suitable lipid emulsion can contain a mixture of LCTs such as soybean oil and/or olive oil, MCTs, and fish oil. An exemplary lipid emulsion is SMOFlipid® 20% (Fresenius-Kabi, Bad Homburg, Germany), an emulsion that contains the LCTs soybean oil (30%) and olive oil (25%), medium-chain triglycerides (30%), and fish oil (15%). Another exemplary lipid emulsion that contains a mixture of LCTs, MCTs and fish oil is Lipoplus® 20% (B. Braun, Inc., Melsungen, Germany). Lipoplus® 20% is an emulsion that contains soybean oil (LCT), MCTs and fish oil.

[0498] Table 11 below provides a list of commercially available lipid emulsions that contain a mixture of LCTs, MCTs and/or fish oils and the corresponding lipid component(s). The lipid emulsions listed in Table 11 and any other known lipid emulsions that contain a mixture of LCTs, MCTs and/or fish oils can be used in the compositions and combinations provided herein.

TABLE 1
LCT, MCT and/or fish oil lipid emulsions

| Lipid | | | Tonicity |
|---|---|---|---|
| emulsion | Lipid component | Emulsifier | modifier |
| Lipofundin ® | Soybean oil (5%), | Egg | Glycerol |
| MCT/LCT 10% | coconut oil (5%) | phospholipid | (2.5%) |
| | | (1.2%) | |
| Lipofundin ® | Soybean oil (10%), | Egg | Glycerol |
| MCT/LCT 20% | coconut oil (10%) | phospholipid | (2.5%) |
| | | (1.2%) | |
| SMOFlipid ® 20% | Soybean oil (6%), | Egg | Glycerol |
| | coconut oil (6%), | phospholipid | (2.5%) |
| | olive oil (5%), | (1.2%) | |
| | fish oil (3%) | | |
| Lipoplus ® 20% | Coconut oil (10%), | Egg | Glycerol |
| | soybean oil (8%), | phospholipid | (2.5%) |
| | fish oil (2%) | (1.2%) | |

[0499] e. Synthetic Lipid Emulsions

[0500] ILEs have been developed that possess physicochemical properties that closely resemble those that contain naturally-occurring lipids. These synthetic lipid emulsions were originally developed to overcome metabolic and immunologic concerns that arose from the use of lipid emulsions containing LCTs, such as soybean oil, and MCTs. Exemplary synthetic lipids include, for example, Structolipid® 20% (Fresenius-Kabi, Bad Homburg, Germany), made by the hydrolysis of soybean oil and MCTs with subsequent random re-esterification of long- and medium-chain fatty acids in the 1, 2, or 3 positions of glycerol, and the synthetic lipid emulsions described in Hultin et al. (1994) J. Lipid Res. 35:1859-1860.

TABLE 12
Synthetic lipid emulsions

| Lipid | | | Tonicity |
|---|---|---|---|
| emulsion | Lipid component | Emulsifier | modifier |
| Structolipid ® | Soybean oil (12.8%), | Egg | Glycerol |
| | coconut oil (7.2%) | phospholipid | (2.25%) |
| | | (1.2%) | |

### F. PHARMACEUTICAL COMPOSITIONS, FORMULATIONS AND ARTICLES OF MANUFACTURE

[0501] Provided herein are compositions containing an oncolytic virus, such as any described herein or known to those of skill in the art including vaccinia viruses, such as LIVP viruses and recombinant form thereof, are formulated for co-administration with or are co-formulated with a complement inhibitor, including, but not limited to, an anti-complement antibody, such as an anti-C5 antibody, and/or with lipid or a lipid emulsion (e.g. formulated with 20% soybean oil intravenous fat emulsion). Such compositions and combinations, when co-formulated for administration together or co-administered separately, provide an adjunct therapy to increase the infectivity of the oncolytic virus compared to administration or delivery of the oncolytic virus without such adjunct.

[0502] For example, provided herein are combinations or compositions containing an oncolytic virus (e.g. a vaccinia virus, such as an LIVP virus or modified form thereof), and a complement inhibitor (e.g. anti-complement antibody, such as an anti-C5 antibody). The oncolytic virus and complement inhibitor can be formulated as separate compositions or all agents can be formulated together. Typically, the compositions are provided separately. For example, provided herein are combinations of separate compositions that are administered separately that include a first composition containing an oncolytic virus (e.g. a vaccinia virus, such as an LIVP virus or modified form thereof) and a second composition containing a complement inhibitor (e.g. anti-complement antibody, such as an anti-C5 antibody). In such examples, the complement inhibitor can be co-administered (prior to, subsequently or intermittently) in combination with a composition containing an oncolytic virus. In other examples, the complement inhibitor and oncolytic virus can be provided in the same composition and can be administered together.

[0503] Also, provided herein are compositions of a lipid-emulsion oncolytic virus that contains an oncolytic virus (e.g. a vaccinia virus, such as an LIVP virus or modified form thereof) that is formulated with a lipid emulsion (e.g. 20% soybean oil intravenous fat emulsion). The lipid-emulsion oncolytic virus also can be provided in combination with another agent, such as a therapeutic agent or another agent that increases virus infectivity (e.g. complement inhibitor). The agents can be formulated as separate compositions or all agents can be formulated together. In particular, the lipid-emulsion oncolytic virus can be co-formulated as a composition with another agent (e.g. complement inhibitor) or provided in combination with another agent (e.g. complement inhibitor). When another agent (e.g. complement inhibitor) is provided separately from a lipid-emulsion oncolytic virus, the agent (e.g. complement inhibitor) can be co-administered (prior to, subsequently or intermittently) in combination with a lipid-emulsion oncolytic virus composition. For example, the combination can be provided as a first composition containing an oncolytic virus (e.g. a vaccinia virus, such as an LIVP virus or modified form thereof) that is formulated with a lipid emulsion (e.g. 20% soybean oil intravenous fat emulsion) and a second composition containing a complement inhibitor (e.g. anti-complement antibody, such as an anti-C5 antibody). In other cases, all agents can be formulated together as a single composition.

[0504] The particular formulation of the agents is within the level of one of skill in the art to determine, and is dependent on the subject being treated, the route of administration, the disease or condition being treated and other factors that can be considered by the skilled artisan.

[0505] The compositions can be formulated for single dosage administration or for multiple dosage administration. The agents can be formulated for direct administration. The compositions can be provided as a liquid or lyophilized formulation. The agents can be formulated into suitable pharmaceutical preparations such as solutions, suspensions, tablets, dispersible tablets, pills, capsules, powders, sustained release formulations or elixirs, for oral administrate, as well as transdermal patch preparation and dry powder inhalers. Typically, the compounds are formulated into pharmaceutical compositions using techniques and procedures well known in the art (see e.g., Ansel Introduction to Pharmaceutical Dosage Forms, Fourth Edition, 1985, 126). Generally, the mode of formulation is a function of the route of administration. The compositions can be co-formulated or provided as separate compositions.

[0506] Typically, compositions, including liquid preparations, can be prepared by conventional means with pharmaceutically acceptable additives or excipients. Where the compositions are provided in lyophilized form they can be reconstituted just prior to use by an appropriate buffer, for example, a sterile saline solution. Pharmaceutically acceptable compositions are prepared in view of approvals for a regulatory agency or other agency prepared in accordance with generally recognized pharmacopeia for use in animals and in humans. The compositions can be formulated for single dosage administration or for multiple dosage administration. The compositions can be formulated for direct administration.

[0507] The pharmaceutical compositions can contain a suitable pharmaceutical carrier. A pharmaceutically acceptable carrier includes a solid, semi-solid or liquid material that acts as a vehicle carrier or medium for the virus or other agent. Pharmaceutical compositions provided herein can be formulated in various forms, for example in solid, semi-solid, aqueous, liquid, powder or lyophilized form. Exemplary pharmaceutical compositions include, but are not limited to, sterile injectable solutions, sterile packaged powders, eye drops, tablets, pills, powders, lozenges, sachets, cachets, elixirs, suspensions, emulsions, solutions, syrups, aerosols (as a solid or in a liquid medium), ointments, soft and hard gelatin capsules, and suppositories.

[0508] Examples of suitable pharmaceutical carriers are known in the art and include, but are not limited to, water, buffers, saline solutions, phosphate buffered saline solutions, various types of wetting agents, sterile solutions, alcohols, gum arabic, vegetable oils, benzyl alcohols, gelatin, glycerin, carbohydrates, such as lactose, sucrose, dextrose, amylose or starch, sorbitol, mannitol, magnesium stearate, talc, silicic acid, viscous paraffin, perfume oil, fatty acid monoglycerides and diglycerides, pentaerythritol fatty acid esters, hydroxy methylcellulose, powders, among others. Pharmaceutical compositions provided herein can contain other additives including, for example, antioxidants, preserving agents, analgesic agents, binders, disintegrants, coloring, diluents, excipients, extenders, glidants, solubilizers, stabilizers, tonicity agents, vehicles, viscosity agents, flavoring agents, sweetening agents, emulsions, such as oil/water emulsions, emulsifying and suspending agents, such as acacia, agar, alginic acid, sodium alginate, bentonite, carbomer, carrageenan, carboxymethylcellulose, cellulose, cholesterol, gelatin, hydroxyethyl cellulose, hydroxypropyl cellulose, hydroxypropyl methylcellulose, methylcellulose, octoxynol 9, oleyl alcohol, povidone, propylene glycol monostearate, sodium lauryl sulfate, sorbitan esters, stearyl alcohol, tragacanth, xanthan gum, and derivatives thereof, solvents, and miscellaneous ingredients, such as, but not limited to, crystalline cellulose, microcrystalline cellulose, citric acid, dextrin, liquid glucose, lactic acid, lactose, magnesium chloride, potassium metaphosphate, starch, among others. Such carriers and/or additives can be formulated by conventional methods and can be administered to the subject at a suitable dose. Stabilizing agents such as lipids, nuclease inhibitors, polymers, and chelating agents can preserve the compositions from degradation within the body. Other suitable formulations for use in a pharmaceutical composition can be found, for example, in Remington: The Science and Practice of Pharmacy (2005, Twenty-first edition, Gennaro & Gennaro, eds., Lippencott Williams and Wilkins).

[0509] The combinations and compositions provided herein can be used in various methods known to one of skill in the art, and in particular for the therapy of tumors or treatment of wounded and inflamed tissues and cells. The compositions for use alone or together in combination with another composition described herein can be administered by any method known to one of skill in the art, such as systemic (e.g. intravenous), oral, intraperitoneal and intratumoral applications. Typically, the compositions are administered systemically, such as intravenously. When provided as separate compositions, the compositions typically are administered by the same route of administration.

[0510] Compositions can be formulated for administration by any route known to those of skill in the art including intramuscular, intravenous, intradermal, intralesional, intraperitoneal injection, subcutaneous, intratumoral, epidural, nasal, oral, vaginal, rectal, topical, local, otic, inhalational, buccal (e.g., sublingual), and transdermal administration or any route. Other modes of administration also are contemplated. Administration can be local, topical or systemic depending upon the locus of treatment. Local administration to an area in need of treatment can be achieved by, for example, but not limited to, local infusion during surgery, topical application, e.g., in conjunction with a wound dressing after surgery, by injection, by means of a catheter, by means of a suppository, or by means of an implant. The most suitable route in any given case depends on a variety of factors, such as the nature of the disease, the progress of the disease, the severity of the disease and the particular composition which is used. Pharmaceutical compositions can be formulated in dosage forms appropriate for each route of administration.

[0511] Systemic or parenteral administration, generally characterized by injection or infusion, either subcutaneously, intramuscularly, intravenous, intraperitoneal or intradermally is contemplated herein. The compositions are formulated in a manner that is suitable for the mode of administration. In particular examples, the compositions are formulated for intravenous administration. Preparations for parenteral administration include sterile solutions ready for injection, sterile dry soluble products, such as lyophilized powders, ready to be combined with a solvent just prior to use, sterile suspensions ready for injection, sterile dry insoluble products ready to be combined with a vehicle just prior to use and sterile emulsions.

[0512] Injectables can be prepared in conventional forms, either as liquid solutions or suspensions, solid forms suitable for solution or suspension in liquid prior to injection, or as emulsions. The compositions provided herein can be formulated in an aqueous solutions, such as in a physiologically compatible buffer. Exemplary parenteral vehicles or buffers include, but are not limited to, Hanks' solution, Ringer's solution, or physiological saline buffer, phosphate buffered saline (PBS), a sodium chloride solution, Ringer's dextrose, dextrose and sodium chloride, lactated Ringer's or fixed oils. For example, suitable carriers include solutions containing thickening and solubilizing agents, such as glucose, polyethylene glycol, and polypropylene glycol and mixtures thereof. The concentration of the pharmaceutically active compound is adjusted so that an injection or infusion provides an effective amount to produce the desired pharmacological effect.

[0513] Compositions also can be administered with other biologically active agents, either sequentially, intermittently or in the same composition. Administration also can include controlled release systems including controlled release formulations and device controlled release, such as by means of a pump.

[0514] 1. Formulation and Dosage Forms

[0515] The compositions can be prepared so that the concentration of the pharmaceutically active compound or agent is adjusted so that administration or delivery (e.g. by injection) provides an effective amount to produce the desired pharmacological effect. The exact dose depends on the age, weight and condition of the patient or animal as is known in the art. The unit-dose parenteral preparations are packaged in an ampoule, a vial or a syringe with a needle. The volume of liquid solution or reconstituted powder preparation, containing the pharmaceutically active compound, is a function of the disease to be treated and the particular article of manufacture chosen for package. All preparations for parenteral administration must be sterile, as is known and practiced in the art.

[0516] a. Oncolytic Virus

[0517] In any examples of the compositions provided herein containing an oncolytic virus, including in combinations with a complement inhibitor (e.g. anti-C5) and/or lipid emulsion, the virus can be prepared at an appropriate concentration in suitable media or pharmaceutical solution depending on the particular application of the composition. Once prepared, the virus can be maintained or stored at a cool temperature (e.g. refrigerated or stored at temperatures greater than −20° C.). For example, immediately prior to use the virus can be maintained on ice until use. If the virus was lyophilized or otherwise dried for storage, then it can be reconstituted in an appropriate aqueous solution. The aqueous solution in which the virus is prepared is typically the medium used in the assay (e.g., DMEM or RPMI) or one that is compatible, such as a buffered saline solution or other isotonic solution. For example, but aqueous solution can be Ringer's solution, Ringer's lactate solution, phosphate-buffered saline (PBS), TRIS-buffered saline (TBS), Hank's balanced salt solution (HBSS), Earle's balanced salt solution (EBSS), standard saline citrate (SSC), HEPES-buffered saline (HBS), Grey's balanced salt solution (GBSS), and normal saline (NaCl).

[0518] For pharmaceutical applications, the virus can be immediately prepared or reconstituted in a pharmaceutical solution. Numerous pharmaceutically acceptable solutions for use are well known in the art (see e.g. Remington's Pharmaceutical Sciences (18^{th} edition) ed. A. Gennaro, 1990, Mack Publishing Co., Easton, Pa.). In one example, the viruses can be diluted in a physiologically acceptable solution, such as sterile saline or sterile buffered saline, with or without an adjuvant or carrier. In other examples, the pharmaceutical solution can contain a component that provides viscosity (e.g. glycerol) and/or component that has bactericidal properties (e.g. phenol). The virus can be reconstituted or diluted to provide the desired concentration or amount. The particular concentration can be empirically determined by one of skill in the art depending on the particular application.

[0519] Pharmaceutical compositions containing an oncolytic virus, such as a vaccinia virus (e.g. LIVP), can be generated to contain a therapeutically effective amount of virus. For example, the compositions can have a virus concentration of from or from about 10⁵-10¹⁰ pfu/mL, for example, 5×10⁶ to 5×10⁹ or 10⁷-10⁹ pfu/mL, such as at least or about or 10⁶ pfu/mL, 10⁷ pfu/mL, 10⁸ pfu/mL or 10⁹ pfu/mL. The pharmaceutical compositions can be provided as liquid compositions having a volume of from or from about 0.01 mL to 100 mL, such as from or from about 0.1 mL to 100 mL, 1 mL to 100 mL, 10 mL to 100 mL, 0.01 mL to 10 mL, 0.1 mL to 10 mL, 1 mL to 10 mL, 0.02 mL to 20 mL, 0.05 mL to 5 mL, 0.5 mL to 50 mL, 0.5 mL to 5 mL, for example, at least or about at least or 0.05 mL, 0.5 mL or 1 mL. For example, the compositions can contain an amount of virus that is or is about 1×10⁵ to 1×10¹² pfu, such as 1×10⁶ to 1×10¹⁰ pfu or 1×10⁷ to 1×10¹⁰ pfu, for example at least or about at least or 1×10⁶, 1×10⁷, 1×10⁸, 1×10⁹, 2×10⁹, 3×10⁹, 4×10⁹, or 5×10⁹ pfu.

[0520] b. Lipid Emulsion (e.g. Lipid-Treated Virus)

[0521] Any of the lipid emulsion compositions described above in Section E can be provided as a composition for use in adjunct therapy with an oncolytic virus. The lipid emulsion can be formulated together or separately from the adjunct therapy. For example, the lipid emulsion can be formulated separately and administered independently from the oncolytic virus, such as prior to, simultaneously, intermittently or subsequently. Suitable emulsions include any described in Section E above, and typically contain up to 40% oil, for example, between 5 and 40%, such as generally up to or about 10%, 20% or 30% of oil. Exemplary of such emulsions are any of the commercially available fat emulsions, such as Intralipid™, Liposyn™, Infonutrol™, Lipofundin™ and Lipiphysan™. Typically, the emulsion will has fat droplets between 0.1 and 1.0 μm, particularly 0.1 and 0.5 μm, and a pH in the range of 5.5 to 8.0.

[0522] Lipid-treated oncolytic virus compositions include emulsions that include an oncolytic virus, a lipid component, an emulsifier, and an aqueous phase. The emulsions can also include one or more additional ingredients, for example, a tonicity modifier, surfactants, co-solvents, bacteriostats, preservatives, active ingredients, and/or adsorbents. The oncolytic virus can be either dissolved in a pre-mixed emulsion composition or alternatively it can be dissolved in an oil (e.g., soybean oil, safflower oil, cottonseed oil, sesame oil, com oil or almond oil) and an emulsion formed upon mixing with a phospholipid (e.g., eggs phospholipids, soybean phospholipids or soybean lecithin) and water. Thus, the lipid emulsion containing an oncolytic virus can be prepared de novo or extemperaneously. It will be appreciated that other ingredients can be added, for example glycerol or glucose, to adjust the tonicity of the emulsion.

[0523] For example, a de novo emulsion can be generated by preparing the virus composition in an aqueous phase with emulsifier by mixing or combining virus with an emulsifier in a suitable aqueous phase. The oily phase containing the lipid component can then be added to the aqueous phase under conditions in which an emulsion is formed. Alternatively, a de novo emulsion can be generated by preparing an oil phase containing the virus, lipid component and emulsifier, which is then added to the aqueous phase under conditions in which an emulsion is formed. The lipid component and virus composition can be emulsified by means of an emulsifier. Emulsification can be achieved by procedures known in the art that achieve mixing of the components. It is understood that the procedures employed to prepare the virus emulsion do not result in inactivation of the virus, for example, due to heat-killing or lysis.

[0524] Typically, the lipid-treated oncolytic virus is prepared extemporaneously as an emulsion by addition of the oncolytic virus to a prepared lipid emulsion composition or vice versa. In such examples, the virus composition and lipid emulsion are combined and mixed. Section E describes exemplary lipid emulsions. For example, the lipid emulsion composition can be an ILE, such as any of the commercially available ILEs that are well known to a skilled artisan. Exemplary ILEs are 10%, 20% or 30% soybean oil intravenous fat emulsions, including those marketed under the name Intralipid®. In some examples, the lipid-treated oncolytic virus composition can be prepared by diluting an oncolytic virus composition by addition of a lipid emulsion. For example, an equal volume of virus and a prepared lipid emulsion preparation (e.g. an ILE, 10%, 20% or 30% soybean oil intravenous fat emulsions, for example, Intralipid®) can be combined and mixed. In other examples, a lyophilized oncolytic virus composition can be reconstituted with a lipid emulsion.

[0525] Generally, the lipid-treated oncolytic virus is prepared by contacting the virus with a biocompatible lipid component a predetermined time before use or administration. For example, the lipid-treated oncolytic virus composition can be prepared extemperaneously prior to use by addition of the lipid emulsion with virus, followed by incubation for a predetermined period of time before use or administration. This can achieve pre-treatment of the virus with components of the lipid emulsion, such as the lipid components, which can alter the properties of the virus or virus composition. Typically, the incubation time and period is such that the virus is not inactivated or its titer is not otherwise reduced. Such time period and incubation conditions can be determined empirically by a person skilled in the art, and are will within the capabilities of a skilled artisan. For example, methods of assessing virus activity or titer are well known to a skilled artisan, and include any assay as described herein in Section G.

[0526] For example, the oncolytic virus, e.g., the vaccinia virus, can be contacted (i.e. pre-treated) with the lipid emulsion (e.g. 10%, 20% or 30% soybean oil intravenous lipid emulsion) for 1 minute to 24 hours, such as 5 minutes to 12 hours, and generally 30 minutes to 6 hours, such as 30 minutes to 3 hours or 30 minutes to 2 hours, for example at least 1 minute, 5 minutes, 10 minutes, 15 minutes, 20 minutes, 25 minutes, 30 minutes, 45 minutes, 1 hour, 1.25 hours, 1.5 hours, 1.75 hours, 2 hours, 2.25 hours, 2.5 hours, 2.75 hours, 3 hours, 3.25 hours, 3.5 hours, 3.75 hours, 4 hours, 4.25 hours, 4.5 hours, 4.75 hours, 5 hours, or more prior to use or administration. The virus and lipid emulsion can be incubated at temperatures at or about 2° C. to 42° C., such as 2° C. to 8° C., 18° C. to 27° C. or 30° C. to 42° C., for example, at least 4° C., 6° C., 8° C., 10° C., 15° C., 20° C., 21° C., 22° C., 23° C. 24° C. 25° C., 26° C., 27° C., 28° C., 29° C. 30° C., 31° C., 32° C., 33° C., 34° C., 35° C., 36° C., 37° C., 38° C., 39° C., 40° C. or more. For example, the virus and lipid emulsions can be incubated at temperatures at or about or up to 37° C. for at least 30 minutes, 1 hour, 2 hours, 3 hours, 4 hours, 5 hours, 6 hours or more.

[0527] In any of the examples of lipid-emulsion oncolytic virus compositions, the lipid-emulsion oncolytic virus is prepared to contain an oncolytic virus at concentration in the resulting composition of 10⁵-10¹² pfu/mL (e.g. at least or about or 10⁶ pfu/mL, 10⁷ pfu/mL, 10⁸ pfu/mL, 10⁹ pfu/mL, 10¹⁰ pfu/mL, 10¹¹ pfu/mL or 10¹⁰ pfu/mL); a lipid component, such as any described in Section E, present as a percentage (%) by weight of the composition (wt %), for example, from at or about 2% to at or about 40% (e.g. at least 2%, 5%, 10%, 15%, 20%, 25%, 30%, 35%, and 40% (wt %) of the composition); an emulsifier, such as any described in Section E, present in an amount as a percentage (%) by weight of the composition (wt %), for example, from at or about 0.2% to at or about 5% (e.g. at or about or at least 0.2%, 0.5%, 1%, 1.2%, 1.5%, 2%, 2.5%, 3%, 3.5%, 4%, 4.5% and 5% (wt %) of the composition); and an aqueous solution provided in an amount for injection to achieve the appropriate concentration of components. The emulsion also can contain other agents. For example, the lipid-treated oncolytic virus also contains a tonicity modifier as described in Section E in an amount that is at or about 0.2% to at or about 5% (e.g. at or about or at least 0.2%, 0.5%, 1%, 1.5%, 2%, 2.25%, 2.5%, 3%, 3.5%, 4%, 4.5% and 5% (wt %) of the composition).

[0528] For example, exemplary of a lipid-treated oncolytic virus provided herein is an emulsion containing 10⁵-10¹² pfu/mL (e.g. at least or about or 10⁶ pfu/mL, 10⁷ pfu/mL, 10⁸ pfu/mL, 10⁹ pfu/mL, 10¹⁰ pfu/mL, 10¹¹ pfu/mL or 10¹⁰ pfu/mL) of a vaccinia virus, such as an LIVP, WR or Copenhagen virus strain, a clonal strain thereof or a modified or recombinant form encoding a heterologous gene product; a biocompatible lipid component that is a soybean oil, almond oil, canola oil, corn oil, cottonseed oil, flaxseed oil, grape seed oil, olive oil, palm oil, peanut oil, safflower oil, sesame oil, sunflower oil, and walnut oil present, or mixture thereof, as a percentage (%) by weight of the composition (wt %), for example, from at or about 2% to at or about 40% (e.g. at least 2%, 5%, 10%, 15%, 20%, 25%, 30%, 35%, and 40% (wt %) of the composition); a biocompatible emulsifier that is an egg yolk phospholipid, hydrogenated egg yolk phospholipid, soybean phospholipid, hydrogenated soybean phospholipid, or mixtures thereof present in an amount as a percentage (%) by weight of the composition (wt %), for example, from at or about 0.2% to at or about 5% (e.g. at or about or at least 0.2%, 0.5%, 1%, 1.2%, 1.5%, 2%, 2.5%, 3%, 3.5%, 4%, 4.5% and 5% (wt %) of the composition); and an aqueous solution provided in an amount for injection to achieve the appropriate concentration of components. In some examples, the lipid-treated oncolytic virus can contain a tonicity modifier, such as glycerol, present in an that is at or about 0.2% to at or about 5% (e.g. at or about or at least 0.2%, 0.5%, 1%, 1.5%, 2%, 2.25%, 2.5%, 3%, 3.5%, 4%, 4.5% and 5% (wt %) of the composition).

[0529] In particular examples, the lipid-treated oncolytic virus provided herein is an emulsion containing a vaccinia virus (e.g. an LIVP, WR or Copenhagen virus strain, a clonal strain thereof or a modified or recombinant form encoding a heterologous gene product) in a 10%, 20% or 30% (wt %) soybean oil intravenous fat emulsion (such as the marketed ILE formulation Intralipid®). For example, such a lipid-emulsion oncolytic virus contains 10⁵-10¹² pfu/mL (e.g. at least or about or 10⁶ pfu/mL, 10⁷ pfu/mL, 10⁸ pfu/mL, 10⁹ pfu/mL, 10¹⁰ pfu/mL, 10¹¹ pfu/mL or 10¹⁰ pfu/mL); 10%, 20% or 30% (wt %) soybean oil; at or about 1.2% (wt %) egg yolk phospholipids; at or about 2.25% (wt %) glycerin; and an aqueous solution provided in an amount for injection to achieve the appropriate concentration of components.

[0530] If necessary to adjust the dosage of virus for administration, any of the generated lipid-treated oncolytic virus compositions can be further diluted prior to use. Generally, the composition is diluted to a virus concentration of 1×10⁷ pfu/mL to 1×10⁹ pfu/mL, such as generally at least 5×10⁷, 6×10⁷, 8×10⁷, 9×10⁷, 1×10⁸, 2×10⁸, 3×10⁸, 4×10⁸, 5×10⁸, 6×10⁸, 7×10⁸, 8×10⁸, 9×10⁸ pfu/mL. In particular, the dilution of the lipid-treated oncolytic virus is generally in an aqueous solution that is a buffered saline solution or other isotonic solution. For example, the aqueous solution can be Ringer's solution, Ringer's lactate solution, phosphate-buffered saline (PBS), TRIS-buffered saline (TBS), Hank's balanced salt solution (HBSS), Earle's balanced salt solution (EBSS), standard saline citrate (SSC), HEPES-buffered saline (HBS), Grey's balanced salt solution (GBSS), and normal saline (NaCl).

[0531] It is understood that dilution of a lipid-treated oncolytic composition will reduce the effective concentration of all components therein. Since the lipid is affecting the virus, and is not itself acting as the active agent per se (in contrast to embodiments herein involving co-administration with a lipid emulsion), a lower concentration of lipid in the resulting administered lipid-treated composition is sufficient to effect an increased virus infectivity of the lipid-treated virus. For example, the effective concentration of the lipid component in a lipid-treated virus can be less than 3-fold or more less than, such as up to 5-fold, 10-fold or 100-fold more less, than the effective concentration of the lipid component when administered as a lipid emulsion composition separately.

[0532] Hence, the resulting lipid-treated composition for administration can contain an oncolytic virus at concentration in the resulting composition of 10⁵-10¹⁰ pfu/mL, such as 1×10⁷ pfu/mL to 1×10⁹ pfu/mL; a lipid component, such as any described in Section E, present as a percentage (%) by weight of the composition (wt %), for example, from at or about 0.001% to at or about 20%, such as generally less than 10% (e.g. at least 0.001%, 0.01%, 0.1%, 1.0%, 2.0%, 3.0%, 4.0%, 5.0%, 6.0%, 7.0%, 8.0, 9.0% (wt %) of the composition); an emulsifier, such as any described in Section E, present in an amount as a percentage (%) by weight of the composition (wt %), for example, from at or about 0.0002% to at or about 5%, such as generally less than 2% (e.g. at or about or at least 0.0002%, 0.002%, 0.02%, 0.2% or 1% (wt %) of the composition); and an aqueous solution provided in an amount for injection to achieve the appropriate concentration of components (e.g. 50% and 99% (wt %)); and optionally a tonicity modifier as described in Section E in an amount that is at or about 0.0002% to at or about 5%, such as generally less than 2% (e.g. at or about or at least 0.0002%, 0.002%, 0.02%, 0.2% or 1% (wt %) of the composition).

[0533] In the lipid-treated oncolytic virus compositions provided herein, generally, the volume of the compositions is 0.01 mL to 100 mL, such as from or from about 0.1 mL to 100 mL, 1 mL to 100 mL, 10 mL to 100 mL, 0.01 mL to 10 mL, 0.1 mL to 10 mL, 1 mL to 10 mL, 0.02 mL to 20 mL, 0.05 mL to 5 mL, 0.5 mL to 50 mL, 0.5 mL to 5 mL, for example, at least or about at least or 0.05 mL, 0.5 mL or 1 mL. Hence, the resulting composition can contain an oncolytic virus (e.g. a vaccinia virus) in an amount that is from or from about 1×10⁵ to 1×10¹² pfu, such as 1×10⁶ to 1×10¹⁰ pfu or 1×10⁷ to 1×10¹⁰ pfu, for example at least or about at least or 1×10⁶, 1×10⁷, 1×10⁸, 1×10⁹, 2×10⁹, 3×10⁹, 4×10⁹, or 5×10⁹ pfu.

[0534] c. Complement Inhibitor Compositions

[0535] Compositions containing a complement inhibitor, either separate or formulated together with an oncolytic virus or lipid-treated oncolytic virus, contain a therapeutically amount of inhibitor for single dosage or multiple dosage administration. The particular formulation and concentration of inhibitor is dependent on the particular inhibitor employed. Since such inhibitors are known to a skilled artisan, including those approved for clinical use, such concentrations are known or can be empirically determined.

[0536] In the compositions or combinations of compositions provided herein, the complement inhibitor, such as an anti-C5 antibody (e.g. eculizumab), is formulated in an amount for direct administration in a range between or between about 1 mg to 5000 mg, such as 10 mg to 5000 mg, 100 mg to 5000 mg, 100 mg to 2500 mg, 100 mg to 1000 mg, 100 mg to 500 mg, 500 mg to 5000 mg, 500 mg to 2500 mg, 500 mg to 1000 mg, 1000 mg to 2500 mg, 2000 mg to 5000 mg or 1500 mg to 2500 mg, generally at least or about at least or about 100 mg, 200 mg, 300 mg, 400 mg, 500 mg, 600 mg, 700 mg, 800 mg, 900 mg or 1000 mg. The composition can be provided as a lyophilized form for later reconstitution or as a liquid formulation.

[0537] For example, in the compositions or combinations of compositions provided herein, the complement inhibitor, such as an anti-C5 antibody (e.g. ecluzumab), is formulated in an amount at a concentration of between about 0.1 mg/mL to 100 mg/mL; between about 0.5 mg/mL to 50 mg/mL; between or about 1 mg/mL to 100 mg/mL; between or about 1 mg/mL to 50 mg/mL; between or about 5 mg/mL to 50 mg/mL; between about 9 mg/mL and 90 mg/mL; between about 9 mg/mL and 50 mg/mL; between about 10 mg/mL and 50 mg/mL; between about 15 mg/mL and 50 mg/mL; between about 15 mg/mL and 100 mg/mL; between about 15 mg/mL and 100 mg/mL; between about 20 mg/mL and 100 mg/mL; between about 20 mg/mL and 80 mg/mL; between about 25 mg/mL and 100 mg/mL; between about 25 mg/mL and 85 mg/mL; between about 20 mg/mL and 50 mg/mL; between about 25 mg/mL and 50 mg/mL; between about 30 mg/mL and 100 mg/mL; between about 30 mg/mL and 50 mg/mL; between about 40 mg/mL and 100 mg/mL; between about 50 mg/mL and 100 mg/mL; or between about 20 mg/mL and 50 mg/mL.

[0538] The volume of the composition can be formulated in a volume that is 0.01 mL to 100 mL, such as from or from about 0.1 mL to 100 mL, 1 mL to 100 mL, 1 mL to 50 mL, 5 mL to 100 mL, 5 mL to 50 mL, 10 mL to 100 mL, 10 mL to 50 mL, 20 mL to 100 mL, 20 mL to 50 mL, 30 mL to 100 mL or 30 mL to 50 mL, for example, at least or about at least or 0.05 mL, 0.5 mL, 1 mL, 2 mL, 3 mL, 4 mL, 5 mL, 6 mL, 7 mL, 8 mL, 9 mL, 10 mL, 20 mL, 30 mL, 40 mL, 50 mL or more. The entire vial contents can be withdrawn for administration, or can be divided up into a plurality of dosages for multiple administration. It is understood that formulations of a complement inhibitor can contain other components, including carriers, polymers, lipids and other excipients.

[0539] For example, eculizumab, is formulated as a preservative-free formulation as a 10 mg/mL solution supplied in a 30 mL volume. Each 30 mL vial contains 300 mg of eculizumab, 13.8 mg sodium phosphate monobasic, 53.4 mg sodium phosphate dibasic, 263.1 mg sodium chloride, 6.6 mg polysorbate 80 and water for injection.

[0540] 2. Combinations

[0541] Any of the combinations and compositions provided herein can be provided in further combination with an additional agent. In one example, lipid-emulsion oncolytic viruses provided herein can be provided in combination with other further agents. In some cases, the further agent can be a complement inhibitor as described elsewhere herein. In other cases, the further agent can be a different agent that is not a complement inhibitor. In still further cases, an oncolytic virus or lipid-emulsion oncolytic virus provided in combination with a complement inhibitor can also be provided in further combination with another additional agent. The choice of additional agent can depend on the particular virus being employed, the particular treatment or diagnosis to be achieved, the disease being treated, the severity or extent of the disease or condition, the health of the subject being treated and other factors within the level of a skilled artisan.

[0542] In examples of combinations herein, an additional agent can be a second virus or lipid-emulsion oncolytic virus, other agent to increase infectivity of the virus or other therapeutic or diagnostic agent. For example, the additional agent can be a therapeutic compound, a therapeutic or diagnostic virus, an antiviral or chemotherapeutic agent or an agent or compound for modulation of gene expression of endogenous or heterologous genes encoded by the virus.

[0543] For example, combinations provided herein can contain an additional agent that is a therapeutic compound. Therapeutic compounds for the combinations provided herein can be, for example, an anti-cancer or chemotherapeutic compound. Exemplary therapeutic compounds include, for example, cytokines, growth factors, photosensitizing agents, radionuclides, toxins, siRNA molecules, enzyme/pro E drug pairs, anti-metabolites, signaling modulators, anti-cancer antibiotics, anti-cancer antibodies, angiogenesis inhibitors, chemotherapeutic compounds, antimetastatic compounds or a combination of any thereof. Viruses provided herein can be combined with an anti-cancer compound, such as a platinum coordination complex. Exemplary platinum coordination complexes include, for example, cisplatin, carboplatin, oxaliplatin, DWA2114R, NK121, IS 3 295, and 254-S. Exemplary chemotherapeutic agents also include, but are not limited to, methotrexate, vincristine, adriamycin, non-sugar containing chloroethylnitrosoureas, 5-fluorouracil, mitomycin C, bleomycin, doxorubicin, dacarbazine, taxol, fragyline, Meglamine GLA, valrubicin, carmustine, polifeprosan, MM1270, BAY 12-9566, RAS farnesyl transferase inhibitor, farnesyl transferase inhibitor, MMP, MTA/LY231514, lometrexol/LY264618, Glamolec, CI-994, TNP-470, Hycamtin/topotecan, PKC412, Valspodar/PSC833, Novantrone/mitoxantrone, Metaret/suramin, BB-94/batimastat, E7070, BCH-4556, CS-682, 9-AC, AG3340, AG3433, Incel/VX-710, VX-853, ZD0101, IS1641, ODN 698, TA 2516/marimastat, BB2516/marimastat, CDP 845, D2163, PD183805, DX8951f, Lemonal DP 2202, FK 317, picibanil/OK-432, valrubicin/AD 32, strontium-89/Metastron, Temodal/temozolomide, Yewtaxan/paclitaxel, Taxol/paclitaxel, Paxex/paclitaxel, Cyclopax/oral paclitaxel, Xeloda/capecitabine, Furtulon/doxifluridine, oral taxoids, SPU-077/cisplatin, HMR 1275/flavopiridol, CP-358 (774)/EGFR, CP-609 (754)/RAS oncogene inhibitor, BMS-182751/oral platinum, UFT (Tegafur/Uracil), Ergamisol/levamisole, Campto/levamisole, Eniluracil/776C85/5FU enhancer, Camptosar/irinotecan, Tomudex/raltitrexed, Leustatin/cladribine, Caelyx/liposomal doxorubicin, Myocet/liposomal doxorubicin, Doxil/liposomal doxorubicin, Evacet/liposomal doxorubicin, Fludara/fludarabine, Pharmorubicin/epirubicin, DepoCyt, ZD1839, LU 79553/Bis-Naphthalimide, LU 103793/Dolastain, Gemzar/gemcitabine, ZD 0473/Anormed, YM 116, Iodine seeds, CDK4 and CDK2 inhibitors, PARP inhibitors, D4809/dexifosfamide, Ifex/Mesnex/ifosfamide, Vumon/teniposide, Paraplatin/carboplatin, Platinol/cisplatin, VePesid/Eposin/Etopophos/etoposide, ZD 9331, Taxotere/docetaxel, prodrugs of guanine arabinoside, taxane analogs, nitrosoureas, alkylating agents such as melphalan and cyclophosphamide, aminoglutethimide, asparaginase, busulfan, carboplatin, chlorambucil, cytarabine HCl, dactinomycin, daunorubicin HCl, estramustine phosphate sodium, etoposide (VP16-213), floxuridine, fluorouracil (5-FU), flutamide, hydroxyurea (hydroxycarbamide), ifosfamide, interferon alfa-2a, interferon alfa-2b, leuprolide acetate (LHRH-releasing factor analogue), lomustine (CCNU), mechlorethamine HCl (nitrogen mustard), mercaptopurine, mesna, mitotane (o,p′-DDD), mitoxantrone HCl, octreotide, plicamycin, procarbazine HCl, streptozocin, tamoxifen citrate, thioguanine, thiotepa, vinblastine sulfate, amsacrine (m-AMSA), azacitidine, erythropoietin, hexamethylmelamine (HMM), interleukin 2, mitoguazone (methyl-GAG; methyl glyoxal bis-guanylhydrazone; MGBG), pentostatin (2′deoxycoformycin), semustine (methyl-CCNU), teniposide (VM-26) and vindesine sulfate. Additional exemplary therapeutic compounds for the use in pharmaceutical compositions and combinations provided herein include cytokines, growth factors, photosensitizing agents, radionuclides, toxins, siRNA molecules, enzyme/pro-drug pairs, anti-metabolites, signaling modulators, anti-cancer antibiotics, anti-cancer antibodies, angiogenesis inhibitors, and chemotherapeutic compounds.

[0544] Other exemplary therapeutic compounds include, for example, compounds that are substrates for enzymes encoded and expressed by the virus, or other therapeutic compounds provided herein or known in the art to act in concert with a virus. For example, the virus can express an enzyme that converts a prodrug into an active chemotherapy drug for killing the cancer cell. Hence, combinations provided herein can contain a therapeutic compound, such as a prodrug. An exemplary virus/therapeutic compound combination can include a virus encoding Herpes simplex virus thymidine kinase with the prodrug ganciclovir. Additional exemplary enzyme/pro-drug pairs, for the use in combinations provided include, but are not limited to, varicella zoster thymidine kinase/ganciclovir, cytosine deaminase/5-fluorouracil, purine nucleoside phosphorylase/6-methylpurine deoxyriboside, beta lactamase/cephalosporin-doxorubicin, carboxypeptidase G2/4-[(2-chloroethyl)(2-mesyloxyethyl)amino]benzoyl-L-glutamic acid, cytochrome P450/acetominophen, horseradish peroxidase/indole-3-acetic acid, nitroreductase/CB1954, rabbit carboxylesterase/7-ethyl-10-[4-(1-piperidino)-1-piperidino]carbonyloxycamptothecin (CPT-11), mushroom tyrosinase/bis-(2-chloroethyl)amino-4-hydroxyphenylaminomethanone 28, beta galactosidase/1-chloromethyl-5-hydroxy-1,2-dihydro-3H-benz[e]indole, beta glucuronidase/epirubicin-glucuronide, thymidine phosphorylase/5′-deoxy-5-fluorouridine, deoxycytidine kinase/cytosine arabinoside, beta-lactamase and linamerase/linamarin. Any of a variety of known combinations provided herein or otherwise known in the art can be included in the combinations provided herein.

[0545] In some examples, the combination can include compounds that can kill or inhibit viral growth or toxicity. Such compounds can be used to alleviate one or more adverse side effects that can result from viral infection (see, e.g. U.S. Patent Pub. No. US 2009-016228-A1). Combinations provided herein can contain antibiotic, antifungal, anti-parasitic or antiviral compounds for treatment of infections. In some examples, the antiviral compound is a chemotherapeutic agent that inhibits viral growth or toxicity. Exemplary antibiotics which can be included in a combination with a virus provided herein include, but are not limited to, ceftazidime, cefepime, imipenem, aminoglycoside, vancomycin and antipseudomonal β-lactam. Exemplary antifungal agents which can be included in a combination with a virus provided herein include, but are not limited to, amphotericin B, dapsone, fluconazole, flucytosine, griseofulvin, itraconazole, ketoconazole, miconazole, clotrimazole, nystatin, and combinations thereof. Exemplary antiviral agents can be included in a combination with a virus provided herein include, but are not limited to, cidofovir, alkoxyalkyl esters of cidofovir (CDV), cyclic CDV, and (S)-9-(3-hydroxy-2 phosphonylmethoxypropyl)adenine, 5-(dimethoxymethyl)-2′-deoxyuridine, isatin-beta-thiosemicarbazone, N-methanocarbathymidine, brivudine, 7-deazaneplanocin A, ST-246, Gleevec, 2′-beta-fluoro-2′,3′-dideoxyadenosine, indinavir, nelfinavir, ritonavir, nevirapine, AZT, ddI, ddC, and combinations thereof. Typically, combinations with an antiviral agent contain an antiviral agent known to be effective against the virus of the combination. Exemplary antiviral compounds include, for example, cidofovir, alkoxyalkyl esters of cidofovir, ganciclovir, acyclovir, ST-246, Gleevec, and derivatives thereof.

[0546] In some examples, the combination can include a detectable compound. A detectable compound can include, for example, a ligand, substrate or other compound that can interact with and/or bind specifically to a protein or RNA encoded and expressed by the virus, and can provide a detectable signal, such as a signal detectable by tomographic, spectroscopic, magnetic resonance, or other known techniques. In some examples, the protein or RNA is an exogenous protein or RNA. In some examples, the protein or RNA expressed by the virus modifies the detectable compound where the modified compound emits a detectable signal. Exemplary detectable compounds can be, or can contain, an imaging agent such as a magnetic resonance, ultrasound or tomographic imaging agent, including a radionuclide. The detectable compound can include any of a variety of compounds as provided elsewhere herein or are otherwise known in the art. Exemplary proteins that can be expressed by the virus and a detectable compound combinations employed for detection include, but are not limited to luciferase and luciferin, β-galactosidase and (4,7,10-tri(acetic acid)-1-(2-β-galactopyranosylethoxy)-1,4,7,10-tetraazacyclododecane) gadolinium (Egad), and other combinations known in the art.

[0547] In some examples, the combination can include a gene expression modulating compound that regulates expression of one or more genes encoded by the virus. Compounds that modulate gene expression are known in the art, and include, but are not limited to, transcriptional activators, inducers, transcriptional suppressors, RNA polymerase inhibitors and RNA binding compounds such as siRNA or ribozymes. Any of a variety of gene expression modulating compounds known in the art can be included in the combinations provided herein. Typically, the gene expression modulating compound included with a virus in the combinations provided herein will be a compound that can bind, inhibit or react with one or more compounds, active in gene expression such as a transcription factor or RNA of the virus of the combination. An exemplary virus/expression modulator combinations can be a virus encoding a chimeric transcription factor complex having a mutant human progesterone receptor fused to a yeast GAL4 DNA-binding domain an activation domain of the herpes simplex virus protein VP16 and also containing a synthetic promoter containing a series of GAL4 recognition sequences upstream of the adenovirus major late E1B TATA box, where the compound can be RU486 (see, e.g., Yu et al., (2002) Mol Genet Genomics 268:169-178). A variety of other virus/expression modulator combinations known in the art also can be included in the combinations provided herein.

[0548] In some examples, the combination can contain one or more additional therapeutic and/or diagnostic viruses or other therapeutic and/or diagnostic microorganism (e.g. therapeutic and/or diagnostic bacteria) for diagnosis or treatment. Exemplary therapeutic and/or diagnostic viruses are known in the art and include, but are not limited to, therapeutic and/or diagnostic poxviruses, herpesviruses, adenoviruses, adeno-associated viruses, and reoviruses.

[0549] 3. Packaging and Articles of Manufacture

[0550] For purposes herein, the compositions typically are provided separately (e.g. lipid-emulsion oncolytic virus or oncolytic virus; complement inhibitor; and, optionally an additional agent). The lipid-emulsion oncolytic virus or oncolytic virus; complement inhibitor; and, optionally an additional agent can be packaged as separate compositions for administration together, sequentially or intermittently. In some examples, an oncolytic virus and a prepared lipid emulsion (e.g. ILE composition) are packaged in a kit separately for extemperaneous preparation of a lipid-emulsion oncolytic virus. The combinations can be packaged as a kit.

[0551] Hence, selected combinations and compositions also can be provided as kits. Kits can include a pharmaceutical composition or combination described herein and optionally, include instructions for application including dosages, dosing regimens and instructions for modes of administration. Kits also can include a pharmaceutical composition described herein and an item for diagnosis. The kits also can include pharmaceutical compositions or combinations described herein, and an item for administration provided as an article of manufacture.

[0552] Also provided are articles of manufacture containing packaging materials, any pharmaceutical composition or combination provided herein, and a label that indicates that the compositions and combinations are to be used for treatment of proliferative disorders, for example cancers. Exemplary of articles of manufacture are containers including single chamber and dual chamber containers. The containers include, but are not limited to, tubes, bottles and syringes. The containers can further include a needle for intravenous or subcutaneous administration. The agents can be provided together or separately, for packaging as articles of manufacture.

[0553] The articles of manufacture provided herein contain packaging materials. Packaging materials for use in packaging pharmaceutical products are well known to those of skill in the art. See, for example, U.S. Pat. Nos. 5,323,907, 5,052,558 and 5,033,252, each of which is incorporated herein in its entirety. Examples of pharmaceutical packaging materials include, but are not limited to, blister packs, bottles, tubes, inhalers, pumps, bags, vials, containers, syringes, bottles, and any packaging material suitable for a selected formulation and intended mode of administration and treatment.

[0554] The choice of package depends on the agents, and whether such compositions will be packaged together or separately. In general, the packaging is non-reactive with the compositions contained therein. In other examples, some of the components can be packaged as a mixture. In other examples, all components are packaged separately. Thus, for example, the components can be packaged as separate compositions that, upon mixing just prior to administration, can be directly administered together. For example, an oncolytic virus and a lipid emulsion preparation can be packaged as separate compositions that can be mixed together to pre-treat the virus prior to use. Alternatively, the components can be packaged as separate compositions for administration separately.

[0555] The components can be packaged in a container. The components can be separately packaged in the same container. Generally, examples of such containers include those that have an enclosed, defined space that contains the polymer-conjugated hyaluronan-degrading enzyme, and a separate enclosed, defined space containing the other components or component such that the subsequent areas are separated by a readily removable membrane which, upon removal, permits the components to mix, or which permits the components to be separately administered. Any container or other article of manufacture is contemplated, so long as the agents are separated from the other components prior to administration. For suitable embodiments see e.g., containers described in U.S. Pat. Nos. 3,539,794 and 5,171,081.

### G. METHODS OF ASSESSING INFECTIVITY AND VIRUS ACTIVITY

[0556] The combinations and compositions provided herein can be tested to determine the infectivity of the oncolytic virus (e.g. vaccinia virus) contained therein, including its anti-tumorigenicity for infection of tumor cells. Assays also can be performed to assess the toxicity or safety. Such assays are well known in the art, and exemplary of such assays are described below. For example, compositions and combinations provided herein, including compositions containing a lipid-treated virus (e.g. lipid-treated virus emulsion) is tested in one or more in vitro and/or in vivo assays that assess infectivity, such as viral titer, viral nucleic acid replication, virus production, viral gene expression from tumor cells, effects on the host cell, cytotoxicity of tumor cells, tumor cell selectivity, tumor cell type selectivity, specific and nonspecific immune response, and therapeutic efficacy. The activity of the virus when administered as an adjunct therapy with another agents, e.g. as a combination or composition with a complement inhibitor (e.g. anti-C5 antibody) or lipid emulsion (e.g. lipid-treated virus) can be compared to the activity of the virus in the absence of the adjunct therapy.

[0557] 1. Viral Infectivity and Anti-Tumorigenicity

[0558] Assays or methods to assess viral infectivity or anti-tumorigenicity are well-known in the art (see e.g. U.S. Patent Pub. No. US-2009-0136917 and US-2012-0308484). Typically, any assay assesses the property or ability of the oncolytic virus to infect target cells, such as tumor cells, when provided as a combination or composition as described herein. Such properties or activities include, but are not limited to, virus titer, virus clearance, receptor binding to a target cell (e.g. tumor cell), target cell (e.g. tumor cell) uptake, or virus replication and gene expression. The assays generally are performed in the presence of or following exposure or incubation of virus or other adjunct therapy with components that typically inactivate the virus. For example, assays are performed in the presence of a bodily fluid, such as blood or serum or other bodily fluid. The bodily fluid is typically a fluid that contains immunomodulatory proteins. In particular, the bodily fluid contains components of the complement system. The bodily fluid also can contain cells, such as immune cells. The assays can be performed in vitro or in vivo.

[0559] The assay can be performed in vitro. For example, an oncolytic virus composition can be exposed or incubated with a bodily fluid (e.g. serum, such as human serum) for a predetermined time in the presence or absence of an adjunct therapy. The predetermined time generally is a time period that results in inactivation, clearance or reduced infectivity of the virus in the absence of the adjunct therapy. Such time period can be determined empirically by a skilled artisan, and is dependent on the particular type of bodily fluid. For example, as shown in the Examples herein, exposure of virus to serum for up to 30 minutes results in inactivation of virus as evidenced by an over 2-fold decreased recovery of virus. Generally, the predetermined time is 5 minutes to 6 hours, and generally at least 10 minutes, 20 minutes, 30 minutes, 45 minutes, 1 hour, 2 hours or more.

[0560] For example, in examples where the adjunct therapy is provided as a composition (e.g. lipid-treated virus), the bodily fluid is treated with the oncolytic virus composition for a predetermined time, such as a time between or between about 20 minutes to 2 hours, such as at least or about 30 minutes. In other examples where the virus is provided separately from the additional agent in the adjunct therapy (e.g. complement inhibitor or lipid emulsion), the bodily fluid can be treated with the agent and virus simultaneously, where each are provided separately. Alternatively, the bodily fluid is first pretreated with the agent prior to treatment with the virus. The time period for pretreatment of the bodily fluid can be empirically determined by a skilled artisan. For example, a time course experiment can be performed. Generally, the time period is 5 minutes to 6 hours, and generally at least 10 minutes, 20 minutes, 30 minutes, 45 minutes, 1 hour, 2 hours or more. The pretreated bodily fluid is then treated with an oncolytic virus composition for the predetermined time.

[0561] In any of such examples, the infectivity of the virus in the bodily fluid can be assessed by monitoring the virus recovery or titer in the bodily fluid. For example, a standard plaque assay can be used. Titration of virus by plaque assay is known to one of skill in the art. Typically, serial dilutions of the bodily fluid treated with virus is made, and diluted virus is added to a monolayer of cells, for example, monolayers of permissive cell line, such as, for example, CV-1, Vero, BHK, RK13 or HEK-293 cell line, and incubated with virus. In some examples, the plaque assay can be performed directly on a cell monolayer of a tumor cells provided that the tumor cells can form a monolayer. Following incubation, an agarose overlay is added to the monolayer of cells without dislodging the cells, and the plate is further incubated until plaques become visible. A dye or color stain solution that is taken up by healthy cells but not dead cells, such as neutral red, is added to each of the wells or plate. After incubation, the dye or stain is removed such that the plaques are observed to be clear, while non-lysed cells remain stained. Titer (pfu/mL) is calculated by counting the number of plaques in the well and dividing by the dilution factor (d) and the volume (V) of diluted virus added to the well (# plaques/d×V). The virus yield can be converted to pfu/cell by dividing the total amount of virus present in the sample by the number of cells originally infected in the sample.

[0562] Alternatively, the bodily fluid containing virus can be assessed for the ability of the virus to infect target cells (e.g. tumor cells). For example, assays to assess infectivity of tumor cells include, but are not limited to viral titer (as assessed by the number of plaques produced in a plaque assay) or the changes in viral gene expression or host gene expression (see, e.g. U.S. Patent Pub. No. 2009-0136917). Assays to assess infectivity can be assessed on cell lysates of cells infected in vitro with any of the compositions provided herein containing an oncolytic virus (e.g. vaccinia virus), for example, various tumor cell lines, primary tissues or cells as well as tumor cells such as from a biopsy. For example, a tissue or cell sample can be obtained (e.g., biopsy) from a subject (e.g., human or non-human animal subject), and the sample can be infected with one or more types of viruses. In other examples, tumor cell lines can be used. Tumor cell lines are known and available to one of skill in the art, for example, from the American Type Culture Collection (ATTC; Manassas, Va.) or from the European Collection of Cell Cultures (ECACC). Tumor cell lines also are available from the Division of Cancer Treatment and Diagnosis (DCTD) Tumor Repository (National Cancer Institute/National Institute of Health; dtp.nih.gov/index.html.) Exemplary of tumor cell lines include human and other animal cells lines and include, but are not limited to, DU145 human prostate carcinoma cells, LNCaP human prostate cancer cells, MCF-7 human breast cancer cells, MRC-5 human lung fibroblast cells, MDA-MB-438 human breast cancer cells, MDA-MB-231 human breast carcinoma cells, PC3 human prostate cancer cells, T47D human breast cancer cells, THP-1 human acute myeloid leukemia cells, U87 human glioblastoma cells, SH-SY5Y human neuroblastoma cells, Saos-2 human cells, A549 human lung carcinoma cells, A2780 human ovarian carcinoma cells, HCT 116 human colon cells, HT-29 human colon cells, SW260 human colon cells, HT-180 human fibrosarcoma, MIA PaCa-2 human pancreatic carcinoma cells, PANC-1 human pancreatic cells, CMT 64 C57BL/6 mouse cell, JC mouse mammary cells, TIB-75 mouse hepatic cells, CT26 WT mouse colon carcinoma cells, MC-38 mouse adenocarcinoma cells, B16-F10 mouse melanoma cells, 4T1 murine mammary carcinoma cells and hamster pancreatic tumor HP-1 cells.

[0563] In particular examples, infectivity is assessed in vivo. For example, combinations or compositions provided herein containing an oncolytic virus can be administered to a subject (e.g. human or non-human animal subject) and properties or activities indicative of infectivity can be monitored and compared to administration of the virus alone in absence of the adjunct therapy. For example, following administration of an adjunct therapy herein (e.g. as a composition or combination with an oncolytic virus), a bodily fluid (e.g. blood or serum) can be collected and virus titer directly determined. Alternatively, target cells (e.g. tumor cells) can be harvested, and plaque assays performed on supernatants or cells lysates of tumors or cells infected with the virus using a standard plaque assay as described above.

[0564] Pharmacokinetics (PK) and pharmacodynamics (PD) assays of oncolytic virus (e.g. vaccinia virus) in the adjunct herapies provided herein can be performed using methods described herein or known in the art (see, e.g., Klutchko, et al., (1998) J. Med. Chem. 41:3276-3292). Examples of parameters of measurement generally include the maximum (peak) plasma concentration (Cₘₐₓ), the peak time (i.e. when maximum plasma concentration occurs; Tₘₐₓ), the minimum plasma concentration (i.e. the minimum plasma concentration between doses; Cₘᵢₙ), the elimination half-life (T_{1/2}) and area under the curve (i.e. the area under the curve generated by plotting time versus plasma concentration; AUC), following administration. The concentration of virus in the plasma following administration can be measured using any method known in the art suitable for assessing concentrations of virus in samples of blood, and typically includes any assay that measures viral titer or is indicative of viral titer, such as a standard plaque assay. PK and PD assays can be performed in any animal model described herein or known in the art, including healthy animal models, diseased animal models (e.g. tumor models) and humans.

[0565] In vivo parameters associated with infection of target cells (e.g. tumor cells) can be assessed. Such properties or activities include, but are not limited to, a desirable therapeutic index in an animal model of cancer, release of tumor antigens and preferential accumulation of the virus in tumor tissues following administration. Other indicators of infectivity of target cells also can be assessed. For example, expression of viral genes, tumor proteins and/or housekeeping genes that are correlated with viral replication and/or infectivity in tumor cells can be assessed (see e.g. U.S. Patent Pub. No. 2009-0136917).

[0566] Other indirect effects resulting from virus infection of cells can be assessed. A virus can destroy tumor cells by replicating such that continual amplification of the virus results in infection of adjacent cells and their subsequent destruction. Oncolytic viruses also exhibit anti-tumorigenicity by expression of proteins that are cytotoxic to cancer cells. In further examples, viruses can exhibit anti-tumorigenicity by initiating specific and nonspecific anti-tumor immune responses, for example, the initiation of cytokine expression from infected cells (e.g. TNF) or through a specific response (e.g. CTL response). Hence, any of the above parameters can be assessed as indicative of anti-tumorigenicity, and hence infectivity, of a virus.

[0567] Virus compositions, provided as a combination or composition in the adjunct therapies provided herein, can be tested to determine if they are cytotoxic or kill tumor cells. For example, viruses can eliminate tumor cells via induction of cell death and/or lysis of the tumor cell (i.e. oncolysis). The cell killing activity of the virus can be assessed by a variety of techniques known in the art including, but not limited to, cytotoxicity/cell viability assays that can be employed to measure cell necrosis and/or apoptosis following virus infection, such as MTT (3-(4,5-dimethylthiazol-2-yl)-2,5-diphenyltetrazolium bromide) assays and other related tetrazolium salt based assays (e.g. XTT, MTS or WST), ATP assays, apoptosis assays, such as TUNEL staining of infected cells, DNA fragmentation assays, DNA laddering assays, and cytochrome C release assays. Such assays are well known to one of skill in the art.

[0568] Virus compositions, provided as a combination or composition in the adjunct therapies provided herein, can be tested to determine if the virus causes shrinkage of tumor size and/or delays tumor progression. Tumor size can be assessed in vivo in tumor-bearing human or animal models treated with virus. Tumor shrinkage or tumor size can be assessed by various assays known in art, such as, by weight, volume or physical measurement. For example, tumor-bearing animal models can be generated using methods well-known in the art, including xenograft models or syngeneic models are used. Tumor size and volume can be monitored based on techniques known to one of skill in the art. For example, tumor size and volume can be monitored by radiography, ultrasound imaging, necropsy, by use of calipers, by microCT or by ¹⁸F-FDG-PET. Tumor size also can be assessed visually. In particular examples, tumor size (diameter) is measured directly using calipers. In other examples, tumor volume can be measured using an average of measurements of tumor diameter (D) obtained by caliper or ultrasound assessments. The volume can be determined from the formula V=D³×π/6 (for diameter measured using calipers) or V=D²×d×π/6 (for diameter measured using ultrasound where d is the depth or thickness). In additional examples, tumors can be harvested from the animals and weighed. In further examples, the harvested tumors can be lysed. For example, lysis of tumors can be by freeze thaw of the harvested tumor several times (e.g. at least 2 times, 3 times or 4 times) shortly after removal of the tumor from the animal. For example, the tumor is lysed by 3 freeze thaw cycles within 2 hours of removal. The virus in the tumor lysates can be tittered as described above and the amount of virus in each tumor sample determined. In some examples, the virus titer can be expressed as tissue culture infectious dose normalized to the tissue weight (TCID₅₀/mg tissue). In particular examples, the effect of the virus on other organs or tissues in the animal can be assessed. For example, other organs can be harvested from the animals, weighed and/or lysed for viral titer determination.

[0569] 2. Toxicity/Safety

[0570] The adjunct therapies provided herein with an oncolytic virus can be tested for parameters indicative of its toxicity/safety property. Viruses can be toxic to their hosts by manufacturing one or more compounds that worsen the health condition of the host. Toxicity to the host can be manifested in any of a variety of manners, including septic shock, neurological effects, or muscular effects. Typically, vaccinia virus exhibits minimal to no toxicity to a host, such that the host does not die or become severely ill from the toxic effects of the virus. For example, the viruses are not toxic or exhibit minimal toxicity if a host typically has no significant long-term effect from the presence of the viruses in the host, beyond any effect on tumorous, metastatic or necrotic organs or tissues. For example, minimal toxicity can be a minor fever or minor infection, which lasts for less than about a month, and following the fever or infection, the host experiences no adverse effects resultant from the fever or infection. In another example, the minimal toxicity can be measured as an unintentional decline in body weight of about 5% or less for the host after administration of the virus. In other examples, the virus has no toxicity to the host.

[0571] Parameters indicative of toxicity or safety of a virus can be tested in vitro or in vivo. Typically, assessment is in vivo. Exemplary methods include administration of the virus to a subject (e.g. animal model) and assessment of one or more properties associated with toxicity including, but not limited to, survival of the subject, decrease in body weight, existence of side effects such as fever, rash or other allergy, fatigue or abdominal pain, induction of an immune response in the subject, tissue distribution of the virus, amount of tumor antigens that are released and decreased rate of pock formation. Hence, any of the above parameters can be assessed as indicative of toxicity/safety of a virus.

### H. ADJUNCT THERAPY FOR INCREASING VIRAL INFECTIVITY

[0572] Oncolytic virus adjunct therapies provided herein, such as combinations or compositions of an oncolytic virus and a complement inhibitor (e.g. anti-C5 antibody) or a lipid emulsion (e.g. lipid-treated virus), can be used in therapeutic methods and uses in which an oncolytic virus is employed. In particular, the combinations and compositions provided herein are particularly suitable for treatment of hyperproliferative diseases or conditions, such as in the treatment of tumors or cancers. If the virus encodes a detectable protein, the adjunct therapy also can be used in methods of diagnosis of a hyperproliferative disease or disorder or monitoring of treatments with a hyperproliferative disease or disorder.

[0573] For example, compositions and combinations provided herein that include an oncolytic virus (e.g. vaccinia virus) and biocompatible lipid (e.g. an LCT, such as in soybean oil), for example co-formulation of an oncolytic virus with a lipid or lipid emulsion (e.g. lipid-treated virus) or co-administration of an oncolytic virus and a lipid emulsion, can be used in therapeutic or diagnostic methods in which an oncolytic virus (e.g. vaccinia virus) is employed or can be employed. In other examples, the compositions and combinations provided herein that include an oncolytic virus (e.g., a vaccinia virus) and a complement inhibitor (e.g. anti-C5 antibody, such as eculizumab), can be used in therapeutic or diagnostic methods in which an oncolytic virus (e.g. vaccinia virus) is employed or can be employed. In such examples, the compositions and combinations for use in the methods and uses provided herein can contain an oncolytic virus (e.g., a vaccinia virus), a complement inhibitor (e.g. anti-C5 antibody) and also optionally a biocompatible lipid components (e.g. lipid emulsion containing a biocompatible lipid) that is formulated together or separately from the oncolytic virus. For example, the compositions and combinations for use in the methods and uses provided herein can include an oncolytic virus that is a lipid-treated virus and a complement inhibitor (e.g. anti-C5 antibody).

[0574] Because the active agent in the adjunct therapy (i.e. the complement inhibitor or lipid emulsion) increases virus infectivity, there is more effective virus available after initial immune clearance. This means that the same anti-tumor effect can be achieved with a lower dose of virus in the adjunct therapy as achieved by a higher dose of virus when the oncolytic virus is not administered in combination with an additional agent as provided herein. Likewise, the adjunct therapy herein also permits the use of a significantly higher dose of input virus (i.e. a dose of virus without dose limiting toxicity), which could translate into higher titer of virus surviving immune clearance and greater therapeutic efficacy because more virus can reach the tumor.

[0575] The combinations and compositions provided herein can be used or modified for use in any known methods (or uses) in which oncolytic viruses have been employed or can be employed (see e.g. see e.g. U.S. Pub. Nos. US2003-0059400, US2003-0228261, US2009-0117034, US2009-0098529, US2009-0053244, US2009-0081639 and US2009-0136917; U.S. Pat. Nos. 7,588,767 and 7,763,420; and International Pub. No. WO 2009/139921). Any oncolytic virus, and in particular any vaccinia virus, such as any LIVP virus (e.g. the GLV-1h68 virus and derivatives thereof) can be used the combination or compositions herein with for use in therapeutic and diagnostic methods described below and discussed throughout the disclosure herein.

[0576] The diagnostic and therapeutic methods provided herein include, but are not limited to, delivering a combinations or compositions provided herein to a subject containing a tumor and/or metastases or wound. In one example, in examples of treatments or methods provided herein, delivery of the composition can be effected by systemic administration, for example intravenous administration of the composition to the subject. The subject can be any subject, such as an animal subject, including mammal or avian species. For example, the animal subject can be a human or non-human animal including, but not limited to, a goat, sheep, horse, cat, or dog. In particular examples, the animal subject is a human subject.

[0577] The composition and combinations provided herein also can be used in further combination with other treatments. For example, treatment also can be accomplished by perfusion, direct injection or local application of the area with an additional anti-cancer therapy. Such treatment can be repeated, for example, every 1, 2, 3, 4, 5, 6, or 7 days, or every 1, 2, 3, 4, and 5 weeks or every 1, 2, 3, 4, 5, 6, 7, 8, 9, 10, 11, or 12 months. These treatments may be of varying dosages as well.

[0578] 1. Hyperproliferative Disease or Disorder

[0579] The combination and compositions provided herein can be used for the treatment of disease or conditions associated with immunoprivileged cells or tissues, including proliferative disorders or conditions, including the treatment (such as inhibition) of cancerous cells, neoplasms, tumors, metastases, cancer stem cells, and other immunoprivileged cells or tissues, such as wounds and wounded or inflamed tissues.

[0580] In particular, provided herein are methods of treating cancerous cells, neoplasms, tumors, metastases and cancer stem cells. The viruses in the combinations and compositions provided herein preferentially accumulate in tumors or metastases. In some examples, the administration of a virus provided herein results in a slowing of tumor growth, and in some cases an inhibition in tumor growth. In other examples, the administration of a virus provided herein results in a decrease in tumor volume, including elimination or eradication of the tumor.

[0581] Methods of reducing or inhibiting tumor growth, inhibiting metastasis growth and/or formation, decreasing the size of a tumor or metastasis, eliminating a tumor or metastasis and/or cancer stem cell or other tumor therapeutic methods provided herein include causing or enhancing an anti-tumor immune response in the host. The immune response of the host, being anti-tumor in nature, can be mounted against tumors and/or metastases in which viruses have accumulated, and can also be mounted against tumors and/or metastases in which viruses have not accumulated, including tumors and/or metastases that form after administration of the virus to the subject. Hence, the virus compositions provided for administration in the combinations and compositions herein can be used in methods to inhibit or prevent recurrence of a neoplastic disease or new tumor growth, where the methods include administering to a subject an adjunct therapy provided herein containing a composition containing an oncolytic virus, whereby the virus can accumulate in a tumor and/or metastasis, and can cause or enhance an anti-tumor immune response, and the anti-tumor immune response can inhibit or prevent recurrence of a neoplastic disease or inhibit or prevent new tumor growth.

[0582] For example, viruses in the combinations or compositions provided herein, when administered or delivered to a subject, can be used to stimulate humoral and/or cellular immune response, induce strong cytotoxic T lymphocytes responses in subjects who can benefit from such responses. For example, the virus can provide prophylactic and therapeutic effects against a tumor infected by the virus or other infectious diseases, by rejection of cells from tumors or lesions using viruses that express immunoreactive antigens (Earl et al., Science 234: 728-831 (1986); Lathe et al., Nature (London) 32: 878-880 (1987)), cellular tumor-associated antigens (Bernards et al., Proc. Natl. Acad. Sci. USA 84: 6854-6858 (1987); Estin et al., Proc. Natl. Acad. Sci. USA 85: 1052-1056 (1988); Kantor et al., J. Natl. Cancer Inst. 84: 1084-1091 (1992); Roth et al., Proc. Natl. Acad. Sci. USA 93: 4781-4786 (1996)) and/or cytokines (e.g., IL-2, IL-12), costimulatory molecules (B7-1, B7-2) (Rao et al., J. Immunol. 156: 3357-3365 (1996); Chamberlain et al., Cancer Res. 56: 2832-2836 (1996); Oertli et al., J. Gen. Virol. 77: 3121-3125 (1996); Qin and Chatterjee, Human Gene Ther. 7: 1853-1860 (1996); McAneny et al., Ann. Surg. Oncol. 3: 495-500 (1996)), or other therapeutic proteins.

[0583] Methods of adjunct therapy provided herein that includes administering a composition containing a virus also can cause tumor cell lysis or tumor cell death. For example viruses, such as the viruses in combinations and compositions provided herein, can cause cell lysis or tumor cell death as a result of expression of an endogenous gene or as a result of an exogenous gene. Endogenous or exogenous genes can cause tumor cell lysis or inhibit cell growth as a result of direct or indirect actions, as is known in the art, including lytic channel formation or activation of an apoptotic pathway. Gene products, such as exogenous gene products can function to activate a prodrug to an active, cytotoxic form, resulting in cell death where such genes are expressed.

[0584] As shown previously, solid tumors can be treated with viruses, such as vaccinia viruses, resulting in an enormous tumor-specific virus replication, which can lead to tumor protein antigen and viral protein production in the tumors (U.S. Patent Publication No. 2005-0031643, now U.S. Pat. Nos. 7,588,767, 7,588,771, 7,662,398), which provide and exemplify the GLV-1h68 virus and derivatives thereof. Vaccinia virus administration to mice resulted in lysis of the infected tumor cells and a resultant release of tumor-cell-specific antigens. Continuous leakage of these antigens into the body led to a very high level of antibody titer (in approximately 7-14 days) against tumor proteins, viral proteins, and the virus encoded engineered proteins in the mice. The newly synthesized anti-tumor antibodies and the enhanced macrophage, neutrophils count were continuously delivered via the vasculature to the tumor and thereby provided for the recruitment of an activated immune system against the tumor. The activated immune system then eliminated the foreign compounds of the tumor including the viral particles. This interconnected release of foreign antigens boosted antibody production and continuous response of the antibodies against the tumor proteins to function like an autoimmunizing vaccination system initiated by vaccinia viral infection and replication, followed by cell lysis, protein leakage and enhanced antibody production.

[0585] In one example, the tumor treated is a cancer or neoplastic disease, such as carcinoma, sarcoma, lymphoma or leukemia. For example, the cancer is a pancreatic cancer, non-small cell lung cancer, multiple myeloma or leukemia, although the cancer is not limited in this respect, and other metastatic diseases can be treated by the combinations provided herein. For example, the tumor can be a tumor of the lung and bronchus, breast, colon and rectum, kidney, stomach, esophagus, liver and intrahepatic bile duct, urinary bladder, brain and other nervous system, head and neck, oral cavity and pharynx, cervix, uterine corpus, thyroid, ovary, testes, prostate, malignant melanoma, cholangiocarcinoma, thymoma, non-melanoma skin cancers, as well as hematologic tumors and/or malignancies, such as childhood leukemia and lymphomas, multiple myeloma, Hodgkin's disease, lymphomas of lymphocytic and cutaneous origin, acute and chronic leukemia such as acute lymphoblastic, acute myelocytic or chronic myelocytic leukemia, plasma cell neoplasm, lymphoid neoplasm and cancers associated with AIDS. Exemplary tumors include, for example, pancreatic tumors, ovarian tumors, lung tumors, colon tumors, prostate tumors, cervical tumors and breast tumors. In one example, the tumor is a carcinoma such as, for example, an ovarian tumor or a pancreatic tumor.

[0586] In particular, the methods can be used for treating solid tumors that include, but are not limited to, sarcomas and carcinomas such as, but not limited to: fibrosarcoma, myxosarcoma, liposarcoma, chondrosarcoma, osteogenic sarcoma, chordoma, angiosarcoma, endotheliosarcoma, lymphangiosarcoma, lymphangioendotheliosarcoma, synovioma, mesothelioma, Ewing's tumor, leiomyosarcoma, rhabdomyosarcoma, colon carcinoma, pancreatic cancer, breast cancer, ovarian cancer, prostate cancer, squamous cellcarcinoma, basal cell carcinoma, adenocarcinoma, sweat gland carcinoma, sebaceous gland carcinoma, papillary carcinoma, papillary adenocarcinomas, cystadenocarcinoma, medullary carcinoma, bronchogenic carcinoma, renal cell carcinoma, hepatoma, bile duct carcinoma, choriocarcinoma, seminoma, embryonal carcinoma, Wilms tumor, cervical cancer, testicular tumor, lung carcinoma, small cell lung carcinoma, bladder carcinoma, epithelial carcinoma, glioma, astrocytoma, medulloblastoma, craniopharyngioma, ependymoma, pinealoma, hemangioblastoma, acoustic neuroma, oligodendroglioma, meningioma, melanoma, neuroblastoma, and retinoblastoma.

[0587] The methods also can be used for treatment of cancers that metastasize. It is understood by those in the art that metastasis is the spread of cells from a primary tumor to a noncontiguous site, usually via the bloodstream or lymphatics, which results in the establishment of a secondary tumor growth. Examples of cancers contemplated for treatment include, but are not limited to melanoma, bladder, non-small cell lung, small cell lung, lung, hepatocarcinoma, retinoblastoma, astrocytoma, glioblastoma, neuroblastoma, head, neck, breast, pancreatic, gum, tongue, prostate, renal, bone, testicular, ovarian, mesothelioma, cervical, gastrointestinal lymphoma, brain, or colon cancer and any other tumors or neoplasms that are metastasized or at risk of metastasis.

[0588] 2. Dosage and Administration

[0589] Any mode of administration of a virus and other agents in the adjunct therapy, e.g. co-administered or co-formulated with the virus, to a subject can be used, provided the mode of administration permits the virus to enter a tumor or metastasis. Modes of administration can include, but are not limited to, systemic, parenteral, intravenous, intraperitoneal, subcutaneous, intramuscular, transdermal, intradermal, intra-arterial (e.g., hepatic artery infusion), intravesicular perfusion, intrapleural, intraarticular, topical, intratumoral, intralesional, endoscopic, multipuncture (e.g., as used with smallpox vaccines), inhalation, percutaneous, subcutaneous, intranasal, intratracheal, oral, intracavity (e.g., administering to the bladder via a catheter, administering to the gut by suppository or enema), vaginal, rectal, intracranial, intraprostatic, intravitreal, aural, ocular or topical administration. In some examples, a diagnostic or other therapeutic agent as described elsewhere herein also can be similarly administered.

[0590] One skilled in the art can select any mode of administration compatible with the subject and the virus, and that also is likely to result in the virus reaching tumors and/or metastases. The route of administration can be selected by one skilled in the art according to any of a variety of factors, including the nature of the disease, the kind of tumor, and the particular virus contained in the pharmaceutical composition.

[0591] The compositions in the adjunct therapies provided herein can be administered by a single injection, by multiple injections, or continuously. For example, the composition(s) can be administered by slow infusion including using an intravenous pump, syringe pump, intravenous drip or slow injection. For example, continuous administration of the compositions can occur over the course of minutes to hours, such as between or between about 1 minutes to 1 hours, such as between 20 and 60 minutes. The components of the composition(s) can be administered separately or together.

[0592] For example, in methods provided herein employing separate administration of a composition containing an oncolytic virus (e.g. vaccinia virus) and a composition containing a complement inhibitor (e.g. anti-C5 antibody), the separate compositions can be administered simultaneously or at different times. For example, the composition containing a complement inhibitor can be administered prior to, subsequently or intermittently from the composition containing the oncolytic virus. Typically, the composition containing the complement inhibitor is administered prior to the composition containing the oncolytic virus, for example, 5 minutes to 12 hours, such as at least 10 minutes, 20 minutes, 30 minutes, 40 minutes, 50 minutes, 1 hour, 2 hours or more prior to administration of the oncolytic virus.

[0593] In examples of methods provided herein employing separate administration of a composition containing an oncolytic virus (e.g. vaccinia virus) and a composition containing a lipid emulsion, such as, for example, Intralipid® lipid emulsion, the separate compositions can be administered simultaneously or at different times. For example, the composition containing a lipid emulsion can be administered prior to, subsequently or intermittently from the composition containing the oncolytic virus. Typically, the composition containing the lipid emulsion is administered prior to the composition containing the oncolytic virus, for example, 5 minutes to 12 hours, such as at least 10 minutes, 20 minutes, 30 minutes, 40 minutes, 50 minutes, 1 hour, 2 hours or more prior to administration of the oncolytic virus.

[0594] The dosage regimen can be any of a variety of methods and amounts, and can be determined by one skilled in the art according to known clinical factors. As is known in the medical arts, dosages for any one patient can depend on many factors, including the subject's species, size, body surface area, age, sex, immunocompetence, and general health, the particular virus to be administered, duration and route of administration, the kind and stage of the disease, for example, tumor size, and other treatments or compounds, such as chemotherapeutic drugs, being administered concurrently. In addition to the above factors, such levels can be affected by the infectivity of the virus, and the nature of the virus, as can be determined by one skilled in the art.

[0595] For example, vaccinia virus, in particular Lister strain, such as LIVP viruses, generally exhibits little to no host toxicity, and hence higher dosages can be tolerated than for other oncolytic viruses. Although administration of a bolus of virus directly into the blood stream can result in rapid dissemination of the virus throughout the organism, the vaccinia virus compositions herein are efficiently delivered and infect immunoprivileged cells and tissues, for example, tumors. Systemic administration, such as intravenous administration, of the virus compositions is possible because the virus is able to accumulate in immunoprivileged cells and tissues (e.g. tumors), yet is efficiently cleared from the subject and does not significantly accumulate in non-tumor tissues. This can result in decreased toxicity. For example, a dose limiting toxicity (DLT) of vaccinia virus (e.g. GL-ONC1) has not been achieved with doses up to 5×10⁹ pfu, such that the maximum tolerated dose (MTD) is greater than 5×10⁹ pfu. In contrast, other oncolytic viruses (e.g. JX-594) can be more toxic so that the maximum tolerated dose (MTD) is only up to 1×10⁹ pfu. While the adjunct therapy herein increases virus infectivity so that there is more effective virus available after initial immune clearance, the low toxicity of vaccinia virus (e.g. LIVP virus) means that a sufficiently high dosage still can be achieved without causing a DLT. Thus, dosages far higher than 5×10⁹ pfu can be realized.

[0596] In the present adjunct therapy methods, appropriate minimum dosage levels and dosage regimes of viruses in the compositions herein can be levels sufficient for the virus to survive, grow and replicate in a tumor, metastasis or other wound or lesion. Generally, the virus is administered in an amount that is at least or about or 1×10⁵ pfu. For example, the dose level can range from 1×10⁶ to 1×10¹² pfu, such as 1×10⁶ to 1×10¹⁰, 1×10⁶ to 1×10⁸ or 1×10⁸ to 1×10¹⁰, each inclusive. Exemplary doses for administering a virus to a 65 kg human can include at least about 1×10⁵ plaque forming units (pfu), at least about 5×10⁵ pfu, at least about 1×10⁶ pfu, at least about 5×10⁶ pfu, at least about 1×10⁷ pfu, at least about 1×10⁸ pfu, at least about 1×10⁹ pfu, at least about 2×10⁹ pfu, at least about 3×10⁹ pfu, at least about 4×10⁹ pfu, at least about 5×10⁹ pfu, at least about 6×10⁹ pfu, at least about 7×10⁹ pfu, at least about 8×10⁹ pfu, at least about 9×10⁹ pfu, at least about 1×10¹⁰ pfu, at least about 1×10¹¹ pfu, at least about 1×10¹² pfu, at least about 1×10¹³ pfu, or at least about 1×10¹⁴ pfu at least one time over a cycle of administration.

[0597] Generally, appropriate maximum dosage levels or dosage regimes of viruses are levels that are not toxic to the host, levels that do not cause splenomegaly of 3 times or more, levels that do not result in colonies or plaques in normal tissues or organs after about 1 day or after about 3 days or after about 7 days.

[0598] It is understood that the particular dosage that is administered using the adjunct therapy provided herein typically is a dosage that achieves a higher efficacy of treatment than a monotherapy with the oncolytic virus administered at the same dosage. Alternatively, the particular dosage administered can be a dosage that is higher or greater than employed in a monotherapy with the oncolytic virus, while maintaining the same or similar therapeutic efficacy.

[0599] The particular dosage employed is a function of the route of administration. For example, generally higher dosage amounts are administered for intravenous, intrapleural or intraperitoneal administration than for other more localized routes of administration. For example, lower dosage amounts can be employed for intracranial or intrathecal injections. The particular dosage can be empirically determined by a skilled artisan depending on the particular virus and adjunct therapy employed. For example, for a vaccinia virus (e.g. LIVP), a dose level ranging from 1×10⁹ to 1×10¹⁰ pfu can be employed for intravenous, intrapleural or intraperitoneal routes of administration. In contrast, for a vaccinia virus (e.g. LIVP), a dose that is one or two logs lower can be employed for intracranial or intrathecal injection, such as a dose level ranging from 1×10⁷ to 1×10⁹.

[0600] In the dosage regime, the amount of virus can be delivered as a single administration or multiple times over a cycle of administration. Hence, in examples herein employing an adjunct therapy as a co-formulation of the virus and another agent that increases virus infectivity (e.g. complement inhibitor and/or biocompatible lipid, such as lipid-treated virus), the other agent also can be administered as a single administration or multiple times over a cycle of administration in accord with the viral dosage regime. In contrast, in examples herein employing an adjunct therapy that includes separate administration of another agent that increases virus infectivity (e.g. complement inhibitor and/or biocompatible lipid, such as lipid emulsion), the other agent can be administered in a cycle of administration that is similar to that employed for the virus or a different cycle of administration can be employed. For example, the other agent can be administered only one time in the cycle of administration, for example, prior to the first administration with virus in a cycle of administration. The particular regime employed can be determined empirically by a skilled artisan, and is dependent on factors that include the particular virus employed, the particular adjunct therapy, the particular subject being treated, the particular disease or condition, the severity of the disease or condition and other factors routinely considered by a skilled medical practitioner.

[0601] In some examples, a single administration of virus is sufficient to establish a virus in a tumor, where the virus can proliferate and can cause or enhance an anti-tumor response in the subject; such methods do not require additional administrations of a virus in order to cause or enhance an anti-tumor response in a subject, which can result, for example in inhibition of tumor growth, inhibition of metastasis growth or formation, reduction in tumor or size, elimination of a tumor or metastasis, inhibition or prevention of recurrence of a neoplastic disease or new tumor formation, or other cancer therapeutic effects.

[0602] In other examples, the virus can be administered on different occasions, separated in time typically by at least one day. For example, the compositions can be administered two times, three time, four times, five times, or six times or more, with one day or more, two days or more, one week or more, or one month or more time between administrations. Separate administrations can increase the likelihood of delivering a virus to a tumor or metastasis, where a previous administration has been ineffective in delivering a virus to a tumor or metastasis. Separate administrations can increase the locations on a tumor or metastasis where virus proliferation can occur or can otherwise increase the titer of virus accumulated in the tumor, which can increase the scale of release of antigens or other compounds from the tumor in eliciting or enhancing a host's anti-tumor immune response, and also can, optionally, increase the level of virus-based tumor lysis or tumor cell death. Separate administrations of a virus can further extend a subject's immune response against viral antigens, which can extend the host's immune response to tumors or metastases in which viruses have accumulated, and can increase the likelihood of a host mounting an anti-tumor immune response.

[0603] When separate administrations are performed, each administration can be a dosage amount that is the same or different relative to other administration dosage amounts. In one example, all administration dosage amounts are the same. In other examples, a first dosage amount can be a larger dosage amount than one or more subsequent dosage amounts, for example, at least 10× larger, at least 100× larger, or at least 1000× larger than subsequent dosage amounts. In one example of a method of separate administrations in which the first dosage amount is greater than one or more subsequent dosage amounts, all subsequent dosage amounts can be the same, smaller amount relative to the first administration.

[0604] Separate administrations can include any number of two or more administrations, including two, three, four, five or six administrations. One skilled in the art can readily determine the number of administrations to perform or the desirability of performing one or more additional administrations according to methods known in the art for monitoring therapeutic methods and other monitoring methods provided herein. Accordingly, the methods provided herein include methods of providing to the subject one or more administrations of a virus, where the number of administrations can be determined by monitoring the subject, and, based on the results of the monitoring, determining whether or not to provide one or more additional administrations. Deciding on whether or not to provide one or more additional administrations can be based on a variety of monitoring results, including, but not limited to, indication of tumor growth or inhibition of tumor growth, appearance of new metastases or inhibition of metastasis, the subject's anti-virus antibody titer, the subject's anti-tumor antibody titer, the overall health of the subject, the weight of the subject, the presence of virus solely in tumor and/or metastases, the presence of virus in normal tissues or organs.

[0605] The time period between administrations can be any of a variety of time periods. The time period between administrations can be a function of any of a variety of factors, including monitoring steps, as described in relation to the number of administrations, the time period for a subject to mount an immune response, the time period for a subject to clear the virus from normal tissue, or the time period for virus proliferation in the tumor or metastasis. In one example, the time period can be a function of the time period for a subject to mount an immune response; for example, the time period can be more than the time period for a subject to mount an immune response, such as more than about one week, more than about ten days, more than about two weeks, or more than about a month; in another example, the time period can be less than the time period for a subject to mount an immune response, such as less than about one week, less than about ten days, less than about two weeks, or less than about a month. In another example, the time period can be a function of the time period for a subject to clear the virus from normal tissue; for example, the time period can be more than the time period for a subject to clear the virus from normal tissue, such as more than about a day, more than about two days, more than about three days, more than about five days, or more than about a week. In another example, the time period can be a function of the time period for virus proliferation in the tumor or metastasis; for example, the time period can be more than the amount of time for a detectable signal to arise in a tumor or metastasis after administration of a virus expressing a detectable marker, such as about 3 days, about 5 days, about a week, about ten days, about two weeks, or about a month.

[0606] For example, an amount of virus is administered two times, three times, four times, five times, six times or seven times over a cycle of administration. The amount of virus can be administered on the first day of the cycle, the first and second day of the cycle, each of the first three consecutive days of the cycle, each of the first four consecutive days of the cycle, each of the first five consecutive days of the cycle, each of the first six consecutive days of the cycle, or each of the first seven consecutive days of the cycle. Generally, the cycle of administration is 7 days, 14 days, 21 days or 28 days. Depending on the responsiveness or prognosis of the patient the cycle of administration is repeated over the course of several months or years.

[0607] In the examples of adjunct therapies herein employing a composition containing a virus and a biocompatible lipid component (e.g. lipid emulsion), such as any of the lipid-treated compositions described in Section F, the effective amount of biocompatible lipid component (e.g. lipid emulsion) that is administered is not pertinent. This is because the lipid is being employed to pretreat the virus, which results in altered properties of the virus; the lipid component is not itself necessarily acting as an active agent in the administration methods.

[0608] In contrast, in examples where the biocompatible lipid (e.g. lipid emulsion) is administered as a combination separately from the virus composition, the biocompatible lipid (e.g. lipid emulsion) is being employed as an active agent. In such examples, the lipid emulsion is typically administered at a sufficiently high concentration or amount that the lipid emulsion itself exhibits direct immunomodulatory effects on immune cells, for example NK cells. For example, the lipid emulsion is administered as a composition containing at least 0.1%, 0.5%, 0.6%, 0.7%, 0.8%, 0.9%, 1.0%, 2.0%, 3.0%, 4.0%, 5.0%, 6.0%, 7.0%, 8.0%, 9.0%, 10.0% or more of a biocompatible lipid component (e.g. soybean oil, such as Intralipid® lipid emulsion). For example, the lipid emulsion is administered in an amount to deliver 1 gram (g) to 50 g, 1 g to 40 g, 1 g to 30 g, 1 g to 20 g, 1 g to 10 g, 1 g to 5 g, 5 g to 50 g, 5 g to 40 g, 5 g to 30 g, 5 g to 20 g, 5 g to 10 g, 10 g to 50 g, 10 g to 40 g, 10 g to 30 g, 10 g to 20 g, 20 g to 50 g, 20 g to 40 g, or 20 g to 30 g of the biocompatible lipid component. The composition containing the lipid component (e.g. lipid emulsion) can be administered in a total volume that is 1 mL to 500 mL, 1 mL to 200 mL, 1 mL to 100 mL, 1 mL to 50 mL, 50 mL to 500 mL, 50 mL to 200 mL, 50 mL to 100 mL, 100 mL to 500 mL, 100 mL to 200 mL, or 200 mL to 500 mL. The composition, such as any described in Sections E or F, can be administered directly, or can be diluted prior to administration. For example, a composition containing a lipid component (e.g. a lipid emulsion, such as an ILE, i.e. Intralipid® lipid emulsion) can be diluted with saline or other aqueous solution or isotonic buffer prior to administration.

[0609] In any of the examples herein of an adjunct therapy containing a complement inhibitor (e.g. an anti-C5 antibody, such as eculizumab), such as combinations and compositions herein with an oncolytic virus, the complement inhibitor is administered in a dosage amount sufficient to effect inhibition of the target complement protein, such as a sufficient amount to inhibit or reduce an effector function associated with the particular target protein. Such dosages or amounts are known to a skilled artisan for known complement inhibitors, or can be empirically determined by a skilled artisan.

[0610] For example, the complement inhibitor (e.g. an anti-C5 antibody, such as eculizumab) is administered to deliver a dose of between 1 ng/kg and 100 mg/kg body weight as a single bolus, or in a repeated regimen, or a combination thereof as readily determined by the skilled artisan. In certain embodiments, the dosage is at least 0.1 mg/kg, or at least 0.2 mg/kg, or at least 0.3 mg kg, or at least 0.4 mg/kg, or at least 0.5 mg/kg, or at least 0.6 mg/kg, or at least 0.7 mg/kg, or at least 0.8 mg/kg, or at least 0.9 mg/kg, or at least 1 mg/kg, or at least 2 mg/kg, or at least 3 mg/kg, or at least 4 mg/kg, or at least 5 mg/kg, or at least 6 mg/kg, or at least 7 mg/kg, or at least 8 mg/kg, or at least 9 mg/kg, or at least 10 mg/kg, or at least 15 mg/kg, or at least 20 mg/kg, or at least 25 mg/kg, or at least 30 mg/kg, or at least 35 mg/kg, or at least 40 mg/kg, or at least 45 mg/kg, or at least 50 mg/kg, or at least 55 mg/kg, or at least 60 mg/kg, or at least 65 mg kg, or at least 70 mg/kg, or at least 75 mg/kg, or at least 80 mg/kg, or at least 85 mg/kg, or at least 90 mg/kg, or at least 95 mg/kg, or at least 100 mg/kg, as a single administration in a cycle of administration or on another suitable periodic regimen. In a particular embodiment, the dosage is between about 0.5 mg/kg and about 20 mg/kg, or between about 1 mg/kg and about 10 mg/kg, or between about 2 mg/kg and about 6 mg/kg.

[0611] For example, wherein the complement inhibitor (e.g. an anti-C5 antibody, such as eculizumab) is administered in an amount to deliver 100 mg to 5000 mg, 200 mg to 2000 mg, 500 mg to 1000 mg, 200 mg to 5000 mg, 200 mg to 1000 mg, 500 mg to 5000 mg, 1000 mg to 2000 mg, 1000 mg to 5000 mg or 2000 mg to 5000 mg, for example at least 800 mg, 900 mg, 1000 mg, 1200 mg to 1500 mg. The composition containing can be administered in a total volume that is 1 mL to 500 mL, 1 mL to 200 mL, 1 mL to 100 mL, 1 mL to 50 mL, 50 mL to 500 mL, 50 mL to 200 mL, 50 mL to 100 mL, 100 mL to 500 mL, 100 mL to 200 mL, or 200 mL to 500 mL.

[0612] 3. Combination Therapy

[0613] The subject also can be undergoing secondary treatment for a tumor, cancer, wound or hyperproliferative surface lesion. For example, the methods herein include further combination therapy with a secondary anti-cancer therapy. Examples of such therapy include, but are not limited to, surgical therapy, chemotherapy, radiation therapy, immunotherapy, treatment with another therapeutic substance or agent and/or administration with another therapeutic virus. These can be administered simultaneously, sequentially or intermittently with the adjunct therapies provided herein.

[0614] a. Oncolytic or Therapeutic Virus

[0615] Methods are provided for administering to a subject in combination with an adjunct therapy provided herein another oncolytic or therapeutic virus. The virus can be any virus that is capable of effecting treatment of diseases or conditions associated with immunoprivileged cells or tissues, including proliferative disorders or conditions, including the treatment (such as inhibition) of cancerous cells, neoplasms, tumors, metastases, cancer stem cells, and other immunoprivileged cells or tissues, such as wounds and wounded or inflamed tissues. For example, the virus is an oncolytic virus. The virus can contain a heterologous gene product that encodes a therapeutic protein or that is detectable or capable of being detected. For example, the virus can be a vaccinia virus (e.g. Lister strain or LIVP), an adenovirus, an adeno-associated virus, a retrovirus, a herpes simplex virus, a reovirus, a mumps virus, a foamy virus, an influenza virus, a myxoma virus, a vesicular stomatitis virus, or any other virus described herein or known in the art, or derivatives or modified forms thereof.

[0616] The virus can be provided as combinations of compositions and/or as kits that include the virus and compositions provided herein packaged for administration and optionally including instructions therefore. The additional virus compositions can contain the viruses formulated for single dosage administration (i.e., for direct administration) and can require dilution or other additions.

[0617] Administration can be effected simultaneously, sequentially or intermittently. The time period between administrations can be any time period that achieves the desired effects, as can be determined by one skilled in the art. Selection of a time period between administrations of different viruses can be determined according to parameters similar to those for selecting the time period between administrations of the same virus, including results from monitoring steps, the time period for a subject to mount an immune response, the time period for a subject to clear virus from normal tissue, or the time period for virus proliferation in the tumor or metastasis. In one example, the time period can be a function of the time period for a subject to mount an immune response; for example, the time period can be more than the time period for a subject to mount an immune response, such as more than about one week, more than about ten days, more than about two weeks, or more than about a month; in another example, the time period can be less than the time period for a subject to mount an immune response, such as less than about one week, less than about ten days, less than about two weeks, or less than about a month. In another example, the time period can be a function of the time period for a subject to clear the virus from normal tissue; for example, the time period can be more than the time period for a subject to clear the virus from normal tissue, such as more than about a day, more than about two days, more than about three days, more than about five days, or more than about a week. In another example, the time period can be a function of the time period for virus proliferation in the tumor or metastasis; for example, the time period can be more than the amount of time for a detectable signal to arise in a tumor or metastasis after administration of a virus expressing a detectable marker, such as about 3 days, about 5 days, about a week, about ten days, about two weeks, or about a month.

[0618] b. Therapeutic Compounds

[0619] Any therapeutic or anti-cancer agent can be used as the second, therapeutic or anti-cancer agent in the combined cancer treatment methods provided herein. The methods can include administering one or more therapeutic compounds to the subject in addition to the adjunct therapy provided herein to a subject. Therapeutic compounds can act independently, or in conjunction with the virus, for tumor therapeutic effects. Therapeutic compounds or agents also include those that are immunotherapeutic compounds. Therapeutic compounds to be administered can be any of those provided herein or in the art.

[0620] Therapeutic compounds that can act independently include any of a variety of known chemotherapeutic compounds that can inhibit tumor growth, inhibit metastasis growth and/or formation, decrease the size of a tumor or metastasis, eliminate a tumor or metastasis, without reducing the ability of a virus to accumulate in a tumor, replicate in the tumor, and cause or enhance an anti-tumor immune response in the subject.

[0621] Therapeutic compounds that act in conjunction with the viruses include, for example, compounds that alter the expression of the viruses or compounds that can interact with a virally-expressed gene, or compounds that can inhibit virus proliferation, including compounds toxic to the virus. Therapeutic compounds that can act in conjunction with the virus include, for example, therapeutic compounds that increase the proliferation, toxicity, tumor cell killing or immune response eliciting properties of a virus, and also can include, for example, therapeutic compounds that decrease the proliferation, toxicity or cell killing properties of a virus. Optionally, the therapeutic agent can exhibit or manifest additional properties, such as, properties that permit its use as an imaging agent, as described elsewhere herein.

[0622] For example, tumors, cancers and metastasis can be a monotherapy-resistant tumor such as, for example, one that does not respond to therapy with virus alone or other therapeutic agent (e.g. anti-cancer agent alone), but that does respond to therapy with a combination of virus and other therapeutic agent (e.g. anti-cancer agent). Typically, a therapeutically effective amount of a virus composition provided herein is administered to the subject and the virus localizes and accumulates in the tumor. Subsequent to administering the virus, the subject is administered a therapeutically effective amount of another therapeutic agent, for example an anti-cancer agent, such as a chemotherapeutic agent (e.g. cisplatin). In one example, the other therapeutic agent is administered once-daily for five consecutive days. One of skill in the art could determine when to administer the therapeutic agent subsequent to the virus using, for example, in vivo animal models. Using the methods provided herein, administration of a virus composition provided herein and other therapeutic agent can cause a reduction in tumor volume, can cause tumor growth to stop or be delayed or can cause the tumor to be eliminated from the subject. The status of tumors, cancers and metastasis following treatment can be monitored using any of the methods provided herein and known in the art.

[0623] Therapeutic compounds or agents include, but are not limited to, chemotherapeutic agents, nanoparticles, radiation therapy, siRNA molecules, enzyme/pro-drug pairs, photosensitizing agents, toxins, microwaves, a radionuclide, an angiogenesis inhibitor, a mitosis inhibitor protein (e.g., cdc6), an antitumor oligopeptide (e.g., antimitotic oligopeptides, high affinity tumor-selective binding peptides), a signaling modulator, anti-cancer antibiotics, or a combination thereof.

[0624] Exemplary photosensitizing agents include, but are not limited to, for example, indocyanine green, toluidine blue, aminolevulinic acid, texaphyrins, benzoporphyrins, phenothiazines, phthalocyanines, porphyrins such as sodium porfimer, chlorins such as tetra(m-hydroxyphenyl)chlorin or tin(IV) chlorin e6, purpurins such as tin ethyl etiopurpurin, purpurinimides, bacteriochlorins, pheophorbides, pyropheophorbides or cationic dyes. In one example, a vaccinia virus, such as a vaccinia virus provided herein, is administered to a subject having a tumor, cancer or metastasis in combination with a photosensitizing agent.

[0625] Radionuclides, which depending up the radionuclide, amount and application can be used for diagnosis and/or for treatment. They include, but are not limited to, for example, a compound or molecule containing ³²Phosphorus, ⁶⁰Cobalt, ⁹⁰Yttrium, ⁹⁹Technitium, ¹⁰³Palladium, ¹⁰⁶Ruthenium, ¹¹¹Indium, ¹¹⁷Lutetium, ¹²⁵Iodine, ¹³¹Iodine, ¹³⁷Cesium, ¹⁵³ Samarium, ¹⁸⁶Rhenium, ¹⁸⁸Rhenium, ¹⁹²Iridium, ¹⁹⁸Gold, ²¹¹Astatine, ²¹²Bismuth or ²¹³Bismuth. In one example, a vaccinia virus, such as a vaccinia virus provided herein, is administered to a subject having a tumor, cancer or metastasis in combination with a radionuclide.

[0626] Toxins include, but are not limited to, chemotherapeutic compounds such as, but not limited to, 5-fluorouridine, calicheamicin and maytansine. Signaling modulators include, but are not limited to, for example, inhibitors of macrophage inhibitory factor, toll-like receptor agonists and stat3 inhibitors. In one example, a vaccinia virus, such as a vaccinia virus provided herein, is administered to a subject having a tumor, cancer or metastasis in combination with a toxin or a signaling modulator.

[0627] Chemotherapeutic compounds include, but are not limited to, alkylating agents such as thiotepa and cyclophosphamide; alkyl sulfonates such as busulfan, improsulfan and piposulfan; aziridines such as benzodepa, carboquone, meturedepa and uredepa; ethylenimine and methylmelamines, including altretamine, triethylenemelamine, triethylenephosphoramide, triethylenethiophosphoramide and trimethylmelamine nitrogen mustards such as chlorambucil, chlornaphazine, chlorophosphamide, estramustine, ifosfamide, mechlorethamine, mechlorethamine oxide hydrochloride, melphalan, novobiocin, phenesterine, prednimustine, trofosfamide, uracil mustard; nitrosoureas such as carmustine, chlorozotocin, fotemustine, lomustine, nimustine, ranimustine; antibiotics such as aclacinomycins, actinomycin, anthramycin, azaserine, bleomycins, cactinomycin, calicheamicin, carubicin, carminomycin, carzinophilin, chromomycins, dactinomycin, daunorubicin, detorubicin, 6-diazo-5-oxo-L-norleucine, doxorubicin, epirubicin, esorubicin, idarubicin, marcellomycin, mitomycins, mycophenolic acid, nogalamycin, olivomycins, peplomycin, porfiromycin, puromycin, quelamycin, rodorubicin, streptonigrin, streptozocin, tubercidin, ubenimex, zinostatin, zorubicin; anti-metabolites such as methotrexate and 5-fluorouracil (5-FU); folic acid analogues such as denopterin, methotrexate, pteropterin, trimetrexate; purine analogs such as fludarabine, 6-mercaptopurine, thiamiprine, thioguanine; pyrimidine analogs such as ancitabine, azacitidine, 6-azauridine, carmofur, cytarabine, dideoxyuridine, doxifluridine, enocitabine, floxuridine; androgens such as calusterone, dromostanolone propionate, epitiostanol, mepitiostane, testolactone; anti-adrenals such as aminoglutethimide, mitotane, trilostane; folic acid replenisher such as folinic acid; aceglatone; aldophosphamide glycoside; aminolevulinic acid; amsacrine; bestrabucil; bisantrene; edatrexate; defosfamide; demecolcine; diaziquone; eflornithine; elliptinium acetate; etoglucid; gallium nitrate; hydroxyurea; lentinan; lonidamine; mitoguazone; mitoxantrone; mopidamol; nitracrine; pentostatin; phenamet; pirarubicin; podophyllinic acid; 2-ethylhydrazide; procarbazine; polysaccharide-K; razoxane; sizofiran; spirogermanium; tenuazonic acid; triaziquone; 2, 2′,2″-trichlorotriethylamine; urethan; vindesine; dacarbazine; mannomustine; mitobronitol; mitolactol; pipobroman; gacytosine; cytosine arabinoside; cyclophosphamide; thiotepa; taxoids, e.g., paclitaxel and docetaxel; chlorambucil; gemcitabine; 6-thioguanine; mercaptopurine; methotrexate; platinum analogs such as cisplatin and carboplatin; vinblastine; platinum; etoposide (VP-16); ifosfamide; mitomycin C; mitoxantrone; vincristine; vinorelbine; Navelbine; Novantrone; teniposide; daunomycin; aminopterin; Xeloda; ibandronate; CPT11; topoisomerase inhibitor RFS 2000; difluoromethylornithine (DMFO); retinoic acid; esperamycins; capecitabine; and pharmaceutically acceptable salts, acids or derivatives of any of the above. Also included are anti-hormonal agents that act to regulate or inhibit hormone action on tumors such as anti-estrogens including for example tamoxifen, raloxifene, aromatase inhibiting 4(5)-imidazoles, 4-hydroxytamoxifen, trioxifene, keoxifene, LY117018, onapristone and toremifene (Fareston); and antiandrogens such as flutamide, nilutamide, bicalutamide, leuprolide and goserelin; and pharmaceutically acceptable salts, acids or derivatives of any of the above. Such chemotherapeutic compounds that can be used herein include compounds whose toxicities preclude use of the compound in general systemic chemotherapeutic methods. Chemotherapeutic agents also include new classes of targeted chemotherapeutic agents such as, for example, imatinib (sold by Novartis under the trade name Gleevec in the United States), gefitinib (developed by AstraZeneca under the trade name Iressa) and erlotinib. Particular chemotherapeutic agents include, but are not limited to, cisplatin, carboplatin, oxaliplatin, DWA2114R, NK121, IS 3 295, and 254-S vincristine, prednisone, doxorubicin and L-asparaginase; mechlorethamine, vincristine, procarbazine and prednisone (MOPP), cyclophosphamide, vincristine, procarbazine and prednisone (C-MOPP), bleomycin, vinblastine, gemcitabine and 5-flurouracil. Exemplary chemotherapeutic agents are, for example, cisplatin, carboplatin, oxaliplatin, DWA2114R, NK121, IS 3 295, and 254-S.

[0628] Exemplary anti-cancer antibiotics include, but are not limited to, anthracyclines such as doxorubicin hydrochloride (adriamycin), idarubicin hydrochloride, daunorubicin hydrochloride, aclarubicin hydrochloride, epirubicin hydrochloride and pirarubicin hydrochloride, phleomycins such as phleomycin and peplomycin sulfate, mitomycins such as mitomycin C, actinomycins such as actinomycin D, zinostatinstimalamer and polypeptides such as neocarzinostatin.

[0629] Anti-cancer antibodies include, but are not limited to, Rituximab, ADEPT, Trastuzumab (Herceptin), Tositumomab (Bexxar), Cetuximab (Erbitux), Ibritumomab (Zevalin), Alemtuzumab (Campath-1H), Epratuzumab (Lymphocide), Gemtuzumab ozogamicin (Mylotarg), Bevacimab (Avastin), Tarceva (Erlotinib), SUTENT (sunitinib malate), Panorex (Edrecolomab), RITUXAN (Rituximab), Zevalin (90Y-ibritumomab tiuexetan), Mylotarg (Gemtuzumab Ozogamicin) and Campath (Alemtuzumab).

[0630] Cancer growth inhibitors use cell-signaling molecules which control the growth and multiplication of cells, such as cancer cells. Drugs that block these signaling molecules can stop cancers from growing and dividing. Cancer growth inhibitors include drugs that block tyrosine kinases (i.e. tyrosine kinase inhibitors; TKIs) or that inhibit the proteasome inhibitors. Examples of TKIs include, but are not limited to, Erlotinib (Tarceva, OSI-774), Iressa (Gefitinib, ZD 1839), Imatinib (Glivec, STI 571) and Bortezomib (Velcade).

[0631] In one example, nanoparticles can be designed such that they carry one or more therapeutic agents provided herein. Additionally, nanoparticles can be designed to carry a molecule that targets the nanoparticle to the tumor cells. In one non-limiting example, nanoparticles can be coated with a radionuclide and, optionally, an antibody immunoreactive with a tumor-associated antigen. In one example, a vaccinia virus in protein polymer composition, such as any provided herein, is administered to a subject having a tumor, cancer or metastasis in combination with a nanoparticle carrying any of the therapeutic agents provided herein.

[0632] Radiation therapy has become a foremost choice of treatment for a majority of cancer patients. The wide use of radiation treatment stems from the ability of gamma-irradiation to induce irreversible damage in targeted cells with the preservation of normal tissue function. Ionizing radiation triggers apoptosis, the intrinsic cellular death machinery in cancer cells, and the activation of apoptosis seems to be the principal mode by which cancer cells die following exposure to ionizing radiation. In one example, a vaccinia virus in protein polymer composition, such as any provided herein, is administered to a subject having a tumor, cancer or metastasis in combination with radiation therapy.

[0633] Therapeutic compounds also include those that can act in conjunction with the virus to increase the proliferation, toxicity, tumor cell killing or immune response eliciting properties of a virus are compounds that can alter gene expression, where the altered gene expression can result in an increased killing of tumor cells or an increased anti-tumor immune response in the subject. A gene expression-altering compound can, for example, cause an increase or decrease in expression of one or more viral genes, including endogenous viral genes and/or exogenous viral genes. For example, a gene expression-altering compound can induce or increase transcription of a gene in a virus such as an exogenous gene that can cause cell lysis or cell death, that can provoke an immune response, that can catalyze conversion of a prodrug-like compound, or that can inhibit expression of a tumor cell gene. Any of a wide variety of compounds that can alter gene expression are known in the art, including IPTG and RU486. Exemplary genes whose expression can be up-regulated include proteins and RNA molecules, including toxins, enzymes that can convert a prodrug to an anti-tumor drug, cytokines, transcription regulating proteins, siRNA and ribozymes. In another example, a gene expression-altering compound can inhibit or decrease transcription of a gene in a virus such as a heterologous gene that can reduce viral toxicity or reduces viral proliferation. Any of a variety of compounds that can reduce or inhibit gene expression can be used in the methods provided herein, including siRNA compounds, transcriptional inhibitors or inhibitors of transcriptional activators. Exemplary genes whose expression can be down-regulated include proteins and RNA molecules, including viral proteins or RNA that suppress lysis, nucleotide synthesis or proliferation, and cellular proteins or RNA molecules that suppress cell death, immunoreactivity, lysis, or viral replication.

[0634] In another example, therapeutic compounds that can act in conjunction with the virus to increase the proliferation, toxicity, tumor cell killing, or immune response eliciting properties of a virus are compounds that can interact with a virally expressed gene product, and such interaction can result in an increased killing of tumor cells or an increased anti-tumor immune response in the subject. A therapeutic compound that can interact with a virally-expressed gene product can include, for example a prodrug or other compound that has little or no toxicity or other biological activity in its subject-administered form, but after interaction with a virally expressed gene product, the compound can develop a property that results in tumor cell death, including but not limited to, cytotoxicity, ability to induce apoptosis, or ability to trigger an immune response. In one non-limiting example, the virus carries an enzyme into the cancer cells. Once the enzyme is introduced into the cancer cells, an inactive form of a chemotherapy drug (i.e., a prodrug) is administered. When the inactive prodrug reaches the cancer cells, the enzyme converts the prodrug into the active chemotherapy drug, so that it can kill the cancer cell. Thus, the treatment is targeted only to cancer cells and does not affect normal cells. The prodrug can be administered concurrently with, or sequentially to, the virus. A variety of prodrug-like substances are known in the art and an exemplary set of such compounds are disclosed elsewhere herein, where such compounds can include gancyclovir, 5-fluorouracil, 6-methylpurine deoxyriboside, cephalosporin-doxorubicin, 4-[(2-chloroethyl)(2-mesyloxyethyl)amino]benzoyl-L-glutamic acid, acetaminophen, indole-3-acetic acid, CB1954, 7-ethyl-10-[4-(1-piperidino)-1-piperidino]carbonyloxycamptothecin, bis-(2-chloroethyl)amino-4-hydroxyphenyl-aminomethanone 28, 1-chloromethyl-5-hydroxy-1,2-dihydro-3H-benz[e]indole, epirubicin-glucuronide, 5′-deoxy-5-fluorouridine, cytosine arabinoside, linamarin, and a nucleoside analogue (e.g., fluorouridine, fluorodeoxyuridine, fluorouridine arabinoside, cytosine arabinoside, adenine arabinoside, guanine arabinoside, hypoxanthine arabinoside, 6-mercaptopurineriboside, theoguanosine riboside, nebularine, 5-iodouridine, 5-iododeoxyuridine, 5-bromodeoxyuridine, 5-vinyldeoxyuridine, 9-[(2-hydroxy)ethoxy]methylguanine (acyclovir), 9-[(2-hydroxy-1-hydroxymethyl)-ethoxy]methylguanine (DHPG), azauridien, azacytidine, azidothymidine, dideoxyadenosine, dideoxycytidine, dideoxyinosine, dideoxyguanosine, dideoxythymidine, 3′-deoxyadenosine, 3′-deoxycytidine, 3′-deoxyinosine, 3′-deoxyguanosine, 3′-deoxythymidine).

[0635] In another example, therapeutic compounds that can act in conjunction with the virus to decrease the proliferation, toxicity or cell killing properties of a virus are compounds that can inhibit viral replication, inhibit viral toxins or cause viral death. A therapeutic compound that can inhibit viral replication, inhibit viral toxins, or cause viral death can generally include a compound that can block one or more steps in the viral life cycle, including, but not limited to, compounds that can inhibit viral DNA replication, viral RNA transcription, viral coat protein assembly, outer membrane or polysaccharide assembly. Any of a variety of compounds that can block one or more steps in a viral life cycle are known in the art, including any known antiviral compound (e.g., cidofovir), viral DNA polymerase inhibitors, viral RNA polymerase inhibitors, inhibitors of proteins that regulate viral DNA replication or RNA transcription. In another example, a virus can contain a gene encoding a viral life cycle protein, such as DNA polymerase or RNA polymerase that can be inhibited by a compound that is, optionally, non-toxic to the host organism.

[0636] Therapeutic compounds also include, but are not limited to, compounds that exert an immunotherapeutic effect, stimulate or suppress the immune system, carry a therapeutic compound, or a combination thereof. Such therapeutic compounds include, but are not limited to, anti-cancer antibodies, radiation therapy, siRNA molecules and compounds that suppress the immune system (i.e. immunosuppressors, immunosuppressive agents). In some cases, it is desirable to administer an immunosuppressive agent to a subject to suppress the immune system prior to the administration of the virus in order to minimize any adverse reactions to the virus. Exemplary immunosuppressive agents include, but are not limited to, glucocorticoids, alkylating agents, antimetabolites, cytokines and growth factors (e.g. interferons) and immunosuppressive antibodies (e.g., anti-CD3 and anti-IL2 receptor antibodies). For example, immunosuppressive agents include biological response modifiers, such as monoclonal antibodies (mAbs), cancer vaccines, growth factors for blood cells, cancer growth inhibitors, anti-angiogenic factors, interferon alpha, interleukin-2 (IL-2), gene therapy and BCG vaccine for bladder cancer

[0637] Cytokines and growth factors include, but are not limited to, interleukins, such as, for example, interleukins (e.g. interleukin-1, interleukin-2, interleukin-6 and interleukin-12), tumor necrosis factors, such as tumor necrosis factor alpha (TNF-α), interferons such as interferon gamma (IFN-γ) or interferon alpha (IFN-α), Granulocyte Colony Stimulating Factor (G-CSF; also called filgrastim (Neupogen) or lenograstim (Granocyte)), Granulocyte and Macrophage Colony Stimulating Factor (GM-CSF; also called molgramostim), angiogenins, erythropoietin (EPO) and tissue factors.

[0638] Cancer vaccines include, for example, antigen vaccines, whole cell vaccines, dendritic cell vaccines, DNA vaccines and anti-idiotype vaccines. Antigen vaccines are vaccines made from tumor-associated antigens in, or produced by, cancer cells. Antigen vaccines stimulate a subject's immune system to attack the cancer. Whole cell vaccines are vaccines that use the whole cancer cell, not just a specific antigen from it, to make the vaccine. The vaccine is made from a subject's own cancer cells, another subject's cancer cells or cancer cells grown in a laboratory. The cells are treated in the laboratory, usually with radiation, so that they can't grow, and are administered to the subject via injection or through an intravenous drip into the bloodstream so they can stimulate the immune system to attack the cancer. One type of whole cell vaccine is a dendritic cell vaccine, which help the immune system to recognize and attack abnormal cells, such as cancer cells. Dendritic cell vaccines are made by growing dendritic cells alongside the cancer cells in the lab. The vaccine is administered to stimulate the immune system to attack the cancer. Anti-idiotype vaccines are vaccines that stimulate the body to make antibodies against cancer cells. Cancer cells make some tumor-associated antigens that the immune system recognizes as foreign. But because cancer cells are similar to non-cancer cells, the immune system can respond weakly. DNA vaccines boost the immune response. DNA vaccines are made from DNA from cancer cells that carry the genes for the tumor-associated antigens. When a DNA vaccine is injected, it enables the cells of the immune system to recognize the tumor-associated antigens, and activates the cells in the immune system (i.e., breaking tolerance).

[0639] The dose scheme of the combination therapy administered is such that the combination of the two or more therapeutic modalities is therapeutically effective. Dosages will vary in accordance with such factors as the age, health, sex, size and weight of the patient, the route of administration, the toxicity of the drugs, frequency of treatment and the relative susceptibilities of the cancer to each of the therapeutic modalities. For combination therapies with additional therapeutic agents provided herein (e.g. chemotherapeutic compounds), dosages for the administration of such compounds are known in the art or can be determined by one skilled in the art according to known clinical factors (e.g., subject's species, size, body surface area, age, sex, immunocompetence, and general health, duration and route of administration, the kind and stage of the disease, for example, tumor size, and other viruses, treatments, or compounds, such as other chemotherapeutic drugs, being administered concurrently). As will be understood by one of skill in the art, the optimal treatment regimen will vary and it is within the scope of the treatment methods to evaluate the status of the disease under treatment and the general health of the patient prior to, and following one or more cycles of combination therapy in order to determine the optimal therapeutic combination.

### I. EXAMPLES

[0640] The following examples are included for illustrative purposes only and are not intended to limit the scope of the invention.

### Example 1

### Generation of Modified LIVP Viruses

[0641] A recombinant, replication-competent vaccinia virus derived from the vaccinia virus LIVP strain (Lister strain from the Institute of Viral Preparations, Moscow, Russia) was generated containing an expression cassette containing a Ruc-GFP cDNA molecule (a fusion of DNA encoding Renilla luciferase and DNA encoding GFP) under the control of a vaccinia synthetic early/late promoter P_{SEL} ((P_{SEL})Ruc-GFP) inserted into the F14.5L gene locus; an expression cassette containing a DNA molecule encoding beta-galactosidase under the control of the vaccinia early/late promoter P_{7.5k} ((P_{7.5k})LacZ), DNA encoding a rat transferrin receptor positioned in the reverse orientation for transcription relative to the vaccinia synthetic early/late promoter P_{SEL} ((P_{SEL})rTrfR) inserted into the TK gene locus (the resulting virus does not express transferrin receptor protein since the DNA molecule encoding the protein is positioned in the reverse orientation for transcription relative to the promoter in the cassette); and an expression cassette containing a DNA molecule encoding β-glucuronidase under the control of the vaccinia late promoter P₁₁ₖ ((P₁₁ₖ)gusA) inserted into the HA gene locus. The genome of the resulting recombinant virus has the sequence of nucleotides set forth in SEQ ID NO:3.

[0642] The virus was produced in CV-1 cells and purified to generate the virus strain designated GLV-1h68. The virus was produced in chicken embryo fibroblast (CEF) cells and purified to generate the virus strain designated GL-ONC1. The virus was produced in CV-1 cells and purified to generate the virus strain designated GL-ONC1A. The virus strains have the same genomic sequence, but differ in the manufacturing procedures used for propagation and purification of virus.

### Example 2

### Effect of Eculizumab on Human Serum Inactivation of GLV-1h68

[0643] The effect of the anti-C5 mAb eculizumab (SEQ ID NO:44, heavy chain and SEQ ID NO:45, light chain; Soliris®, Lot 10007A; Alexion Pharmaceuticals, Chesire, Conn.) on the infectivity of vaccinia virus strain GLV-1h68 in human serum was evaluated. GLV-1h68 virus described in Example 1 (2.5×10⁵ pfu/mL) was exposed to either human serum, human serum that had been heated to 58° C. for 30 minutes to inactivate complement in the serum, or human serum that had been pretreated with either 0.001 mg/mL, 0.01 mg/mL, 0.1 mg/mL or 1 mg/mL eculizumab.

[0644] After exposure of the virus to the serum for 30 minutes at room temperature, the infectivity of the virus compositions was assessed by viral plaque assay on CV-1 cells. A viral titer assay was performed in a standard plaque assay using African green monkey kidney fibroblast CV-1 cells (ATCC No. CCL-70; American Type Culture Collection, Manassas, Va.). CV-1 cells were plated in a 24-well plate at 2.5×10⁵ cells per well and grown until near confluency. Wells containing a cell monolayer were infected with serial dilutions of the virus compositions. The cells in each well were overlaid with virus overlay medium (DMEM+5% FBS+1% Antibiotic-Antimycotic Solution+1.5% carboxymethylcellulose), and the cells were further incubated until plaques were visible. After addition of color dye to visualize the plaques, viral titer (pfu/mL) was calculated by counting the number of plaques in the well and dividing by the dilution factor (d) and volume (V) of diluted virus added to the well.

[0645] Results are provided in Table 13 below. The results show that exposure of the GLV-1h68 virus to human serum alone resulted in a 58% loss in virus titer (42% recovered titer), while exposure of GLV-1h68 to the heat-inactivated control serum had no effect on the infectivity of the virus (100% recovered titer). The amount of recovered titer varied with the concentration of eculizumab in the sample and ranged from 38% to 81% recovered titer. At concentrations of eculizumab of 0.1 mg/mL and 1 mg/mL there was an increase in recovered titer of virus compared to absence of treatment with the antibody, and thus a decrease in loss of virus titer upon exposure to serum. Infectivity was preserved approximately 2-fold when the virus was exposed to serum pretreated with eculizumab as compared to untreated serum. The results indicate that inactivation of complement by treating human serum with 0.1 mg/mL or 1 mg/mL of the anti-C5 mAb eculizumab reduced the loss of infectivity of GLV-1h68 as compared to human serum that had not been treated with eculizumab.

TABLE 13
% Recovered titer of GLV-1h68 in human serum
with varying concentrations of eculizumab

| | Eculizumab | |
|---|---|---|
| | concentration | Recovered |
| Serum exposure | (mg/mL) | titer (%) |
| Heat-inactivated | 0 | 100 |
| human serum | | |
| Human serum | 0 | 42 |
| Human serum | 0.001 | 40 |
| Human serum | 0.01 | 38 |
| Human serum | 0.1 | 72 |
| Human serum | 1 | 81 |

### Example 3

### Adsorption of GLV-1h68 to Human Blood Cells in the Presence of Serum

[0646] The adsorption of vaccinia virus strain GLV-1h68 described in Example 1 to human whole blood cells was evaluated. Whole human blood cells were prepared from a normal human donor by collecting blood in EDTA and isolating cells by centrifugation. The cells were washed with phosphate buffered saline (PBS) to remove any plasma/EDTA and were resuspended in PBS to the original blood volume. GLV-1h68 virus (2.0×10⁷ pfu/mL) was exposed to whole human blood cells (33% of blood concentration) in either phosphate buffered saline (PBS), human serum, heat-inactivated human serum that had been heated to 58° C. for 30 minutes to inactivate complement in the serum, or human serum that had been pretreated with 1 mg/mL eculizumab (Soliris®, Lot 10007A; Alexion Pharmaceuticals, Chesire, Conn.).

[0647] After exposure for 60 minutes at 37° C., the virus fraction bound to blood cells was separated from the unbound fraction by centrifugation and washed with PBS to remove loosely bound virus. The infectivity of the virus was assessed by the viral plaque assay on CV-1 cells described in Example 2. The recovered titer of cell-bound and unbound virus was determined.

[0648] The Results are set forth in Table 14. The results show that 21% of the GLV-1h68 virus in PBS was cell-bound, while 79% remained unbound, for a total recovery of 100%. This value was used as a comparative standard relative to the values obtained in the human serum compositions, and the percent recovered titer of cell-bound virus and unbound virus compared to PBS control was determined.

[0649] In human serum, the total amount of virus recovered (bound and unbound) relative to PBS was reduced to only 67%, indicating that the virus was inactivated by the serum. When virus was exposed to heat-inactivated serum, which inactivates complement, there was an increase in total recovery of virus (bound and unbound) of 78% compared to the human serum treated samples. This result demonstrates that inhibiting complement can reduce virus inactivation by serum. Exposure of virus to human serum in the presence of the anti-C5 mAb eculizumab resulted in an even greater total recovery of virus (bound and unbound) of 150% compared to the PBS reference control. The recovery of 150% compared to the PBS control likely indicates that a fraction of the total virus in the PBS sample was lost during the centrifugation and washing of the cell-bound virus.

[0650] In addition to effects on total virus recovery, treatment with human serum resulted in 49% of the virus being cell-bound and 18% remaining unbound. In the heat-treated serum with inactivated complement, 5% of the virus was cell-bound and 73% unbound. Thus, the results show that heat-treating the serum inactivated complement and reduced the binding of the virus to blood cells, in addition to also reducing the inactivation of the unbound virus. In contrast, the amount of cell-bound virus in the human serum sample pretreated with 1 mg/mL eculizumab was 118% and the amount of unbound virus 32%, relative to the PBS control. This result demonstrates that inactivation of complement by treating human serum with 1 mg/mL of the anti-C5 mAb eculizumab increased the binding of GLV-1h68 to human blood cells. Thus, the results show that treatment with the anti-C5 mAb both reduces inactivation of the virus by serum and increases the propensity of binding of the virus to blood cells.

TABLE 14
Cell-bound and unbound GLV-1h68 in human serum and PBS

| | Cell-bound | Unbound | Total |
|---|---|---|---|
| Treatment | virus (%) | virus (%) | virus (%) |
| PBS | 21 | 79 | 100 |
| Heat-inactivated | 5 | 73 | 78 |
| human serum | | | |
| Human serum | 49 | 18 | 67 |
| Human serum + 1 | 118 | 32 | 150 |
| mg/mL eculizumab | | | |

### Example 4

### Effect of Eculizumab on the Adsorption of GLV-1h68, GL-ONC1 and GL-ONC1A to Human Blood Cells in Serum

[0651] The effect of eculizumab (Soliris®, Lot 10007A; Alexion Pharmaceuticals, Chesire, Conn.) on the adsorption of vaccinia virus strains GLV-1h68, GL-ONC1 and GL-ONC1A to human whole blood cells in human serum was evaluated. GLV-1h68, GL-ONC1 and GL-ONC1A viruses (2.0×10⁷ pfu/mL), described in Example 1, were exposed to whole human blood cells purified as described in Example 3 in either human serum or human serum that had been pretreated with 1 mg/mL eculizumab. After exposure for 30 minutes at room temperature, the virus fraction bound to blood cells was separated from the unbound fraction by centrifugation and washed with PBS to remove loosely bound virus. The infectivity of the virus was assessed by the viral plaque assay on CV-1 cells as described in Example 2. The recovered titer of cell-bound and unbound virus was determined, and the percent recovered titer of cell-bound virus and unbound virus compared to PBS control was calculated.

[0652] The results are shown in Table 15 below. The results show that similar to GLV-1h68, exposure of the other virus strains GL-ONC1 and GL-ONC1A to human serum pretreated with anti-C5 mAb eculizumab also increased total recovery of the virus (bound and unbound) and therefore reduced inactivation of the virus by serum. The results also show that the fraction of cell-bound virus increased in all three vaccinia viruses that had been exposed to human serum pretreated with 1 mg/mL eculizumab as compared to human serum that had not been pretreated with eculizumab (relative to PBS control). The most substantial increase occurred with GLV-1h68, but all three viruses exhibited increased binding to blood cells after exposure to eculizumab.

[0653] The results show that virus infectivity was substantially preserved when virus was exposed to serum treated with anti-C5 mAb eculizumab. Thus, the results show that treatment with anti-C5 mAb increased the retention of infectivity of GLV-1h68 and two related virus strains by the inactivation of C5 complement activity in serum. Infectivity was increased approximately 2-fold when virus was exposed to serum treated with anti-C5 mAb eculizumab compared to untreated serum. In addition, exposure to serum treated with anti-C5 mAb eculizumab also increased the amount of GLV-1h68, and two related viruses manufactured by alternative processes, that bound to human blood cells, thereby also preserving infectivity compared to unbound virus.

TABLE 15
Cell-bound and unbound GLV-1h68, GL-ONC1 and GL-ONC1A in
human serum and human serum pre-treated with eculizumab

| | | Cell-bound | Unbound | Total |
|---|---|---|---|---|
| Virus | Treatment | virus (%) | virus (%) | virus (%) |
| GLV-1h68 | Human serum | 38 | 13 | 51 |
| GLV-1h68 | Human serum + 1 | 94 | 18 | 112 |
| | mg/mL eculizumab | | | |
| GL-ONC1 | Human serum | 25 | 27 | 52 |
| GL-ONC1 | Human serum + 1 | 43 | 37 | 80 |
| | mg/mL eculizumab | | | |
| GL-ONC1A | Human serum | 52 | 36 | 88 |
| GL-ONC1A | Human serum + 1 | 106 | 34 | 140 |
| | mg/mL eculizumab | | | |

### Example 5

### Effect of Intralipid® Lipid Emulsion on Human Serum Inactivation of GLV-1h68

[0654] The effect of the soybean oil emulsion Intralipid® (20% lipid suspension, Lot 5LBD3129V; Sigma-Aldrich Corp., St. Louis, Mo.) on the infectivity of vaccinia virus strain in human serum was evaluated.

[0655] 1. GLV-1h68

[0656] GLV-1h68 as described in Example 1 was either untreated or was pretreated with Intralipid® for 1 hour at 37° C. Briefly, a virus stock suspension (ranging from 1-10×10⁹ pfu/mL in 1 mM Tris-HCl, pH 9.0) were mixed with an equal volume of Intralipid® lipid emulsion (20% lipid emulsion) and incubated for 1 hour at 37° C. with occasional mixing. The virus was then diluted to the appropriate concentration in phosphate buffered saline (PBS) for use in the experiment. Untreated GLV-1h68 virus or GLV-1h68 virus pretreated with Intralipid® lipid emulsion were exposed to either human serum or control medium DMEM (2% FBS) at three different concentrations (5×10⁷ pfu/mL, 5×10⁵ pfu/mL and 5×10⁴ pfu/mL). After exposure for 30 minutes at room temperature, the infectivity of the viruses was assessed by the viral plaque assay on CV-1 cells described in Example 2.

[0657] The results are shown in Table 16. Exposure of untreated or treated GLV-1h68 to the control medium (DMEM+2% FBS) did not result in any substantial differences in virus infectivity at all concentrations tested, since the recovered titer was substantially the same for the tested groups. In contrast, the results show that exposure of GLV-1h68 to human serum did reduce the recovered titer, consistent with serum inactivation of virus. The results indicate that treating GLV-1h68 at varying concentrations with Intralipid® lipid emulsion reduced the virus sensitivity to serum inactivation by approximately 2-fold.

[0658] Further experiments were performed by adding Intralipid® to serum at concentrations similar to that present with virus pretreated with Intralipid® lipid emulsion, and prior to addition of virus. The results show that preadministration of Intralipid® to serum at these concentrations did not reduce the amount of serum inactivation of the virus in the same manner as when the virus was pretreated with Intralipid® lipid emulsion. Intralipid® addition to serum did reduce the amount of serum inactivation of virus, but only at concentrations about 5 fold higher than would have been present with the pretreated virus.

TABLE 16
% Recovered titer of GLV-1h68 in human serum and DMEM after
treatment with Intralipid ® lipid emulsion

| | Virus | | Recovered |
|---|---|---|---|
| Virus: Treatment | concentration | Medium | titer (%) |
| GLV-1h68 | 5 × 10⁷ pfu/mL | DMEM | 100 |
| GLV-1h68: Intralipid ® | 5 × 10⁷ pfu/mL | DMEM | 102 |
| GLV-1h68 | 5 × 10⁷ pfu/mL | Human | 50 |
| | | serum | |
| GLV-1h68: Intralipid ® | 5 × 10⁷ pfu/mL | Human | 85 |
| | | serum | |
| GLV-1h68 | 5 × 10⁵ pfu/mL | DMEM | 100 |
| GLV-1h68: Intralipid ® | 5 × 10⁵ pfu/mL | DMEM | 106 |
| GLV-1h68 | 5 × 10⁵ pfu/mL | Human | 32 |
| | | serum | |
| GLV-1h68: Intralipid ® | 5 × 10⁵ pfu/mL | Human | 61 |
| | | serum | |
| GLV-1h68 | 5 × 10⁴ pfu/mL | DMEM | 100 |
| GLV-1h68: Intralipid ® | 5 × 10⁴ pfu/mL | DMEM | 76 |
| GLV-1h68 | 5 × 10⁴ pfu/mL | Human | 28 |
| | | serum | |
| GLV-1h68: Intralipid ® | 5 × 10⁴ pfu/mL | Human | 59 |
| | | serum | |

[0659] 2. Other Vaccinia Virus Strains

[0660] The effect of Intralipid® on human serum inactivation of another exemplary vaccinia virus strain was assessed. Untreated virus or virus pretreated with Intralipid® lipid emulsion for 4 hours at 37° C. were exposed to either human serum or the control medium DMEM (2% FBS) at two different concentrations (5×10⁷ pfu/mL and 5×10⁵ pfu/mL). After exposure for 30 minutes at room temperature, the infectivity of the viruses was assessed by the viral plaque assay on CV-1 cells described in Example 2.

[0661] The results are shown in Table 17 below. Similar to the results with GLV-1h68, exposure of untreated or treated virus to the control medium (DMEM+2% FBS) did not result in any substantial differences in virus infectivity at all concentrations tested, since the recovered titer was substantially the same for the tested groups. The results show that treatment of virus with Intralipid® lipid emulsion reduced the loss in infectivity of the viruses exposed to human serum by approximately half

TABLE 17
% Recovered titer of Vaccinia Virus in human serum and DMEM after
treatment with Intralipid ® lipid emulsion

| | Virus | | Recovered |
|---|---|---|---|
| Virus Treatment | concentration | Medium | titer (%) |
| no pretreatment | 5 × 10⁷ pfu/mL | DMEM | 100 |
| pretreatment: | 5 × 10⁷ pfu/mL | DMEM | 100 |
| Intralipid ® | | | |
| no pretreatment | 5 × 10⁷ pfu/mL | Human | 36 |
| | | serum | |
| pretreatment: | 5 × 10⁷ pfu/mL | Human | 66 |
| Intralipid ® | | serum | |
| no pretreatment | 5 × 10⁵ pfu/mL | DMEM | 100 |
| treatment: | 5 × 10⁵ pfu/mL | DMEM | 100 |
| Intralipid ® | | | |
| no pretreatment | 5 × 10⁵ pfu/mL | Human | 18 |
| | | serum | |
| treatment: | 5 × 10⁵ pfu/mL | Human | 27 |
| Intralipid ® | | serum | |

### Example 6

### Effect of Intralipid® Lipid Emulsion on the Adsorption of GLV-1h68 to Human Blood Cells in the Presence of Serum

[0662] The effect of the soybean oil emulsion Intralipid® (20% lipid suspension, Lot 5LBD3129V; Sigma-Aldrich Corp., St. Louis, Mo.) on the adsorption of vaccinia virus strain GLV-1h68 in human serum was evaluated. GLV-1h68 (3.3×10⁷ pfu/mL) as described in Example 1 was either untreated or was pretreated with Intralipid® lipid emulsion for 1 hour at 37° C. as described in Example 5. Untreated GLV-1h68 virus or GLV-1h68 virus pretreated with Intralipid® were exposed to human whole blood cells (purified as described in Example 3) in human serum. After exposure for 60 minutes at 37° C., the virus fraction bound to blood cells was separated from the unbound fraction by centrifugation and washed with PBS to remove loosely bound virus.

[0663] Table 18 below depicts the results. The results show that treatment of GLV-1h68 with Intralipid® lipid emulsion increased total recovery of virus (bound and unbound), indicating that the pretreatment with Intralipid® reduces virus inactivation caused by serum. The results show that treating the GLV-1h68 with Intralipid® did not affect the amount of virus that bound to blood cells as compared to the untreated GLV-1h68. The amount of unbound virus that was recovered, however, was substantially greater for the Intralipid®-treated virus than for the untreated virus, indicating a lesser sensitivity of the unbound virus to serum inactivation.

TABLE 18
Cell-bound and unbound untreated or Intralipid ®-treated
GLV-1h68 in human serum

| | Cell-bound | Unbound | Total |
|---|---|---|---|
| Virus: Treatment | virus (%) | virus (%) | virus (%) |
| GLV-1h68 | 50 | 13 | 63 |
| GLV-1h68: Intralipid ® | 52 | 48 | 100 |
| lipid emulsion | | | |

### Example 7

### Pharmacokinetic Evaluation of Nude and Wild Type Mice to Determine the Effect of Intralipid® Pretreatment of Vaccinia Virus

[0664] The pharmacokinetic effects of Intralipid® lipid emulsion-pretreated Vaccinia virus in tumor-bearing nude and wild type BALB/C mice (Harlan, female, 20-24 grams body weight) following intravenous injection were evaluated. Mice were injected subcutaneously with mouse 4T1 mammary carcinoma cell (ATCC) to establish tumors. Specifically, 1×10⁵ 4 T1 cells in 0.1 cc of PBS were injected subcutaneously on the upper right thigh of each animal. At time of virus injection, 11 days after tumor cell implantation, mice were observed to have tumors of approximately 250-500 mm³. Because this study was only intended to evaluate the blood concentration of virus, tumors were not harvested or evaluated in these animals.

[0665] A vaccinia virus strain containing a heterologous nucleic acid molecule encoding a detectable marker TurboFP635 was treated with Intralipid® lipid emulsion as described in Example 5. Vaccinia virus strain (5×10⁶ pfu/mouse) that was untreated or that was pretreated with the soybean oil emulsion Intralipid® lipid emulsion (20% lipid suspension, Lot 5LBD3129V; Sigma-Aldrich Corp., St. Louis, Mo.) were administered to nude mice (Group A, untreated, n=4; Group B, pretreated n=5) and BALB/c mice (Group C, untreated, n=5; Group D, pretreated n=5) via tail vein. In several mice the intravenous tail vein injection was unsuccessful and the virus was injected into the abdominal aorta. Blood samples were collected from the abdominal aorta at regular intervals post-injection (p.i.) beginning at approximately 1 minute p.i. to 120 minutes p.i. The samples were anticoagulated with EDTA, immediately frozen on dry ice, and assessed by viral plaque assay for infectious virus on CV-1 cells as described in Example 2. PK parameters were calculated in Microsoft Excel using a PK calculation module.

[0666] With respect to virus titer (pfu/mL) in the blood, the results show that the highest concentration of virus post-injection occurred at the earliest time point measured (approximately 1 minute p.i.) and declined rapidly with each measurement. In Groups of mice where the virus was pretreated with Intralipid® lipid emulsion, there was a consistently higher detection of virus titer in the blood at the earlier time points than in the corresponding mice administered untreated virus.

| | Average Time | | |
|---|---|---|---|
| | Post-Injection | Average Titer/ | SD Titer/ |
| Group | (Min ± SD) | mL Blood | mL Blood |
| A | Preinjection | Not Detectable | Not Detectable |
| (Nude mice; | 0.9 ± 0.1 | 2.6 × 10⁶ | 2.0 × 10⁶ |
| no | 2.1 ± 0.1 | 4.7 × 10⁵ | 3.8 × 10⁵ |
| pretreatment) | 5.5 ± 0.6 | 4.5 × 10⁴ | 1.8 × 10⁴ |
| | 10.2 ± 0.2 | 2.0 × 10⁴ | 1.3 × 10⁴ |
| | 30.5 ± 3.5 | 1.8 × 10⁴ | 2.1 × 10⁴ |
| | 61.0 ± 1.4 | 2.1 × 10³ | 0.0 |
| B | Preinjection | Not Detectable | Not Detectable |
| (Nude mice; | 1.4 ± 0.4 | 3.6 × 10⁶ | 2.5 × 10⁶ |
| Intralipid ® | 3.2 ± 0.8 | 4.7 × 10⁵ | 3.3 × 10⁵ |
| lipid | 5.4 ± 0.2 | 2.9 × 10⁵ | 2.6 × 10⁵ |
| emulsion) | 10.7 ± 1.0 | 7.0 × 10⁴ | 7.9 × 10⁴ |
| | 33.6 ± 3.3 | 6.7 × 10³ | 5.7 × 10³ |
| | 44.7 ± 0.9 | 6.4 × 10³ | 1.6 × 10² |
| | 67.9 ± 12.3 | 2.1 × 10³ | 1.5 × 10³ |
| C | Preinjection | Not Detectable | Not Detectable |
| (Balb/C | 1.0 ± 0.1 | 3.8 × 10⁶ | 3.0 × 10⁶ |
| mice; no | 2.0 ± 0.4 | 1.1 × 10⁶ | 9.2 × 10⁵ |
| pretreatment) | 5.4 ± 0.3 | 8.7 × 10⁴ | 5.7 × 10⁴ |
| | 10.8 ± 0.5 | 6.7 × 10⁴ | 3.4 × 10⁴ |
| | 33.5 ± 9.9 | 4.4 × 10⁴ | 5.5 × 10⁴ |
| D | Preinjection | Not Detectable | Not Detectable |
| (Balb/C | 1.1 ± 0.2 | 7.2 × 10⁶ | 1.9 × 10⁶ |
| mice; | 2.2 ± 0.3 | 4.6 × 10⁶ | 2.7 × 10⁶ |
| Intralipid ® | 5.3 ± 0.8 | 7.3 × 10⁵ | 5.5 × 10⁵ |
| lipid | 10.5 ± 0.5 | 1.8 × 10⁵ | 1.9 × 10⁵ |
| emulsion) | 36.1 ± 13.6 | 4.6 × 10⁴ | 3.0 × 10⁴ |

[0667] Results were analyzed through 10 minutes post-injection for maximum blood titer (Cₘₐₓ), calculated half-life in blood (t½), the rate constant for elimination of the virus from blood (Kₑₗᵢₘ), and the tissue exposure to the injected virus (AUC) from 1 to 10 minutes (AUC₀₋₁₀) and from 1 to infinity (AUC_{0-inf}). The group average results and percent differences between the group average PK values are illustrated in Tables 19 and 20, respectively.

TABLE 19
Group average PK values

| | Group A | Group B | Group C | Group D |
|---|---|---|---|---|
| | (n = 4) | (n = 5) | (n = 5) | (n = 5) |
| Mouse strain | Nude | Nude | BALB/c | BALB/c |
| Virus | no | Intralipid ® | no | Intralipid ® |
| Treatment | pretreat- | lipid | pretreat- | lipid |
| | ment | emulsion | ment | emulsion |
| Cₘₐₓ (pfu/mL) | 2.6 × 10⁶ | 3.6 × 10⁶ | 3.8 × 10⁶ | 7.2 × 10⁶ |
| tₘₐₓ (min) | 0.9 | 1.4 | 1.0 | 1.1 |
| t½ (min) | 0.8 | 1.1 | 0.8 | 1.3 |
| Kₑₗᵢₘ | 0.09 | 0.10 | 0.10 | 0.13 |
| AUC₀₋₁₀ | 2.8 × 10⁶ | 5.5 × 10⁶ | 4.8 × 10⁶ | 1.8 × 10⁷ |
| (pfu · min/mL) | | | | |
| AUC_{0-inf} | 2.9 × 10⁶ | 5.5 × 10⁶ | 5.2 × 10⁶ | 1.8 × 10⁷ |
| (pfu · min/mL) | | | | |

TABLE 20
Percent difference in group average PK values

| | Group comparison | | | |
|---|---|---|---|---|
| | B vs. A | D vs. C | A vs. C | B vs. D |
| Mouse | Nude | BALB/c | Nude vs. | Nude vs. |
| strain | | | BALB/c | BALB/c |
| Virus: | Intralipid ® | Intralipid ® | untreated | Intralipid ® |
| Treatment | treated vs. | lipid | (nude) vs. | lipid treated |
| | untreated | treated vs. | untreated | (nude) vs. |
| | | untreated | (BALB/C) | Intralipid ® |
| | | | | lipid emulsion |
| | | | | treated |
| | | | | (BALB/C) |
| Cₘₐₓ | 140% | 191% | 68% | 50% |
| tₘₐₓ | n/a | n/a | n/a | n/a |
| t½ | 139% | 151% | 97% | 89% |
| Kₑₗᵢₘ | 110% | 126% | 86% | 76% |
| AUC₀₋₁₀ | 193% | 367% | 59% | 31% |
| AUC_{0-inf} | 192% | 344% | 55% | 31% |

[0668] The group average PK values were compared between the four groups of mice. Comparison of the group average PK values between the Group A (nude) and Group C (BALB/c) mice that received untreated virus revealed that the total tissue exposure (AUC_{0-inf}) of the nude mice was less than the BALB/c mice (55%) due to a decrease in the Cₘₐₓ of the nude mice compared to the BALB/c mice (68%). However, the t½ was comparable in both groups (97%).

[0669] Comparison of the group average PK values between the mice injected with untreated virus and the mice injected with the Intralipid® lipid emulsion-treated virus resulted in an increase in the total tissue exposure (AUC_{0-inf}) in the mice injected with the Intralipid® lipid emulsion-treated virus as compared to the mice injected with untreated virus. There was a 192% increase in AUC_{0-inf} in nude mice and a 344% increase in the BALB/c mice (Group B vs. Group A and Group D vs. Group C, respectively), corresponding to a 140% increase in the Cₘₐₓ and a 139% increase in the t½ in nude mice and a 191% increase in the Cₘₐₓ and a 151% increase in the t½ in the BALB/c mice.

[0670] The differences in PK values between the nude mice and the BALB/c mice injected with the Intralipid® lipid emulsion-treated virus were consistent with the differences observed with the untreated virus. The half-lives of the two viruses were substantially comparable in nude and BALB/c mice.

[0671] Overall, pretreatment of virus with Intralipid® lipid emulsion increased the maximum exposure of virus in blood (AUC_{0-inf}) by 2-3 fold post-injection. The increase was due to a reduction in the rate of elimination of the virus (Kₑₗᵢₘ) and an increase in the circulation half-life (t½).

### Example 8

### Effect of Eculizumab on Human Serum Inactivation of GLV-1h68 with Serum from Five Human Blood Donors

[0672] The effect of the anti-C5 mAb eculizumab (SEQ ID NO:44, heavy chain and SEQ ID NO:45, light chain; sold under the trademark Soliris®, Lot 10007A; Alexion Pharmaceuticals, Chesire, Conn.) on the infectivity of vaccinia virus strain GLV-1h68 was evaluated in serum from five additional human blood donors. GLV-1h68 virus described in Example 1 (2.5×10⁵ pfu/mL) was exposed to either human serum, human serum that had been heated to 58° C. for 30 minutes to inactivate complement in the serum, or human serum that had been pretreated with 1 mg/mL eculizumab.

[0673] After exposure of the virus to the serum for 30 minutes at room temperature, the infectivity of the virus compositions was assessed by viral plaque assay on CV-1 cells. A viral titer assay was performed in a standard plaque assay using African green monkey kidney fibroblast CV-1 cells (ATCC No. CCL-70; American Type Culture Collection, Manassas, Va.). CV-1 cells were plated in a 24-well plate at 2.5×10⁵ cells per well and grown until near confluency. Wells containing a cell monolayer were infected with serial dilutions of the virus compositions. The cells in each well were overlaid with virus overlay medium (DMEM+5% FBS+1% Antibiotic-Antimycotic Solution+1.5% carboxymethylcellulose), and the cells were further incubated until plaques were visible. After addition of color dye to visualize the plaques, viral titer (pfu/mL) was calculated by counting the number of plaques in the well and dividing by the dilution factor (d) and volume (V) of diluted virus added to the well. Tests were conducted in triplicate and the average of 6 measures (2 per replicate) are reported.

[0674] Results are provided in Table 21 below. The results show that exposure of the GLV-1h68 virus to various human sera alone resulted in recovery of virus titer ranging from 3% to 38%. Addition of ecuzimulab to the serum for 30 minutes at room temperature prior to exposure of the virus resulted in substantial increase in the recovered virus titers, ranging from 24% to 91%. The fold increase in titer recovery in serum with ecuzimulab compared to serum alone ranged from 2.4 to 7.4. The results indicate that inhibiting complement by treating human serum with 1 mg/mL of the anti-C5 mAb eculizumab reduced the loss of infectivity of GLV-1h68 as compared to serum that had not been treated with eculizumab.

[0675] While the results demonstrated variable amounts of virus inactivation activity in the various sera, increase in infectious virus recovery after treatment with eculizumab was obtained with all sera from the five individual blood donors. Four of the donor sera, #1 to #4, contained very little, if any, anti-vaccinia neutralizing antibody as evident from the recovery of nearly 100% of the virus after exposure to serum that had been heat-treated to inactivate complement activity, but not antibody activity. For Donor #5, only 68% of the virus was recovered after exposure to serum that had been heat-treated, indicating that this serum had substantial anti-vaccinia neutralizing antibody. Yet in all cases, exposure of virus to serum in the presence of eculizumab increased the recovery of infectious virus by 2.4 to 7.4 fold over serum alone.

TABLE 21
% Recovered titer of GLV-1h68 in human serum from five
healthy human blood donors without or with eculizumab

| Blood | | Recovered | Fold Increase over |
|---|---|---|---|
| Donor | Serum exposure | titer (%) | serum alone |
| #1 | Serum | 22 | N/A |
| | Serum + Eculizumab (1 | 77 | 3.5 |
| | mg/mL) | | |
| | Heat inactivated serum | 98 | N/A |
| #2 | Serum | 22 | N/A |
| | Serum + Eculizumab (1 | 60 | 2.7 |
| | mg/mL) | | |
| | Heat inactivated serum | 107 | N/A |
| #3 | Serum | 25 | N/A |
| | Serum + Eculizumab (1 | 63 | 2.5 |
| | mg/mL) | | |
| | Heat inactivated serum | 100 | N/A |
| #4 | Serum | 38 | N/A |
| | Serum + Eculizumab (1 | 91 | 2.4 |
| | mg/mL) | | |
| | Heat inactivated serum | 124 | N/A |
| #5 | Serum | 3 | N/A |
| | Serum + Eculizumab (1 | 24 | 7.4 |
| | mg/mL) | | |
| | Heat inactivated serum | 68 | N/A |

### Example 9

### Adsorption of GLV-1h68 to Human Blood Cells from Five Healthy Human Blood Donors in the Presence of Matched Serum

[0676] The adsorption of vaccinia virus strain GLV-1h68 described in Example 1 to human whole blood cells was evaluated. Whole human blood cells were prepared from five healthy human blood donors by collecting blood in EDTA and isolating cells by centrifugation. The cells were washed with phosphate buffered saline (PBS) to remove any plasma/EDTA and were resuspended in PBS to the original blood volume. GLV-1h68 virus (2.0×10⁶ pfu/mL) was exposed to whole human blood cells (33% of blood concentration) in either human serum, heat-inactivated human serum that had been heated to 58° C. for 30 minutes to inactivate complement in the serum, or human serum that had been pretreated with 1 mg/mL eculizumab (Soliris®, Lot 10007A; Alexion Pharmaceuticals, Chesire, Conn.). GLV-1h68 (2.0×10⁶ pfu/mL) in PBS serve as a control.

[0677] After exposure for 60 minutes at 37° C., the virus fraction bound to blood cells was separated from the unbound fraction by centrifugation and washed with PBS to remove loosely bound virus. The infectivity of the virus was assessed by the viral plaque assay on CV-1 cells described in Example 2. The recovered titer of cell-bound virus was determined Tests were conducted in triplicate and the average of 6 measures (2 per replicate) are reported.

[0678] The Results are set forth in Table 22. The results show that 21% of the GLV-1h68 virus in PBS was cell-bound, while 79% remained unbound, for a total recovery of 100%. This value was used as a comparative standard relative to the values obtained in the human serum compositions, and the percent recovered titer of cell-bound virus and unbound virus compared to PBS control was determined.

[0679] In human serum, the fraction of virus recovered bound to blood cells ranged from 27% to 90% for blood cells and serum from Donors 1 to 4. For Donor 5, who had substantial levels of serum anti-vaccinia neutralizing antibody, the fraction of virus recovered cell-bound in serum was 2%, indicating that the virus was inactivated by the serum. When virus was exposed to heat-inactivated serum, which inactivates complement, there was a substantial decrease in the fraction of virus recovered bound to blood cells was ≦4% for all donors. This result demonstrates that while reducing the amount of virus inactivation by the serum, heat-inactivating complement also reduces the amount of virus bound to blood cells.

[0680] Exposure of virus to human serum in the presence of the anti-C5 mAb eculizumab resulted in an increase in the fraction of virus recovered bound to blood cells. For Donors 1 to 4, 89% to 173% of the virus was recovered bound to blood cells (1.9 to 3.4 fold increase over serum alone). For Donor 5, whose serum contained anti-vaccinia neutralizing antibody, 53% of the virus was recovered bound to cells in serum in the presence of anti-C5 mAb eculizumab (27.3 fold increase over serum alone). This indicates that inhibiting complement by treatment of serum with eculizumab increases the fraction of bound virus in blood from individuals even with anti-vaccinia neutralizing antibody. Additionally, for some individuals exposure of virus with serum treated with eculizumab boosts the infectivity of the virus that is bound to blood cells in excess of that obtained with the virus in PBS.

TABLE 22
GLV-1h68 bound to human blood cells in human serum

| Blood | | Cell-bound | Fold increase over |
|---|---|---|---|
| Donor | Serum exposure | virus titer (%) | serum alone |
| #1 | Serum | 27 | N/A |
| | Serum + Eculizumab (1 | 89 | 3.4 |
| | mg/mL) | | |
| | Heat inactivated serum | 4 | N/A |
| #2 | Serum | 36 | N/A |
| | Serum + Eculizumab (1 | 98 | 2.7 |
| | mg/mL) | | |
| | Heat inactivated serum | 3 | N/A |
| #3 | Serum | 55 | N/A |
| | Serum + Eculizumab (1 | 128 | 2.4 |
| | mg/mL) | | |
| | Heat inactivated serum | 3 | N/A |
| #4 | Serum | 90 | N/A |
| | Serum + Eculizumab (1 | 173 | 1.9 |
| | mg/mL) | | |
| | Heat inactivated serum | 4 | N/A |
| #5 | Serum | 2 | N/A |
| | Serum + Eculizumab (1 | 53 | 27.3 |
| | mg/mL) | | |
| | Heat inactivated serum | 1 | N/A |

### Example 10

### Effect of Intralipid® Lipid Emulsion on NK Cell Activity

[0681] Intralipid® lipid emulsion (20% lipid suspension, Lot 5LBD3129V; Sigma-Aldrich Corp., St. Louis, Mo.) was assessed to test the effect of Intralipid® lipid emulsion on the cytotoxicity of human NK cells using the standard human NK cell target K-562 (human erythroleukemia cell line). Intralipid® lipid emulsion at the following concentrations 0.4 microliters (IL), 0.8 μL, 1 μL, 2 μL and 4 μL was added to 1 ml of media containing 800,000 human NK cells. The results showed that even at the lowest concentration, the Intralipid® lipid emulsion suppressed the cytotoxicity of the NK cells with a more pronounced effect at 1 μL/ml.

[0682] Since modifications will be apparent to those of skill in this art, it is intended that the inventions are limited only by the scope of the appended claims.

1. Use of an anti-complement component 5 (C5) antibody for increasing infectivity of an oncolytic virus.

2. The use of claim 1, wherein the antibody is eculizumab, pexelizumab, TSA12/22 or MB12/122, and variants thereof that bind to C5.

3. The use of claim 1 or claim 2, wherein the anti-C5 antibody is provided in a composition that also contains the oncolytic virus.

4. A method of increasing infectivity of an oncolytic virus, comprising administering the oncolytic virus and an anti-C5 antibody to a subject, wherein the virus and antibody are administered separately, in the same composition, sequentially or intermittently.

5. The method of claim 4, wherein the virus and antibody are administered in the same composition.

6. The method of claim 4, wherein the virus and antibody are administered in separate compositions.

7. The method of claim 4, wherein the antibody is administered before the virus is administered.

8. The use or method of any of claims 1-5, wherein the oncolytic virus is treated with a lipid emulsion containing a biocompatible lipid component that is comprised of fatty acids and/or fatty acid derivatives.

9. The use or method of any of claims 1-5, wherein the oncolytic virus is administered with or is in a composition comprising a biocompatible lipid component that is comprised of fatty acids and/or fatty acid derivatives, wherein the composition is an emulsion.

10. A composition, comprising:
an oncolytic virus; and
an anti-complement component 5 (C5) antibody.

11. The composition of claim 10, wherein the antibody is eculizumab, pexelizumab, TSA12/22 or MB12/122, and variants thereof that bind to C5.

12. The composition of claim 10, comprising a biocompatible lipid component that is comprised of fatty acids and/or fatty acid derivatives

13. A composition, comprising an oncolytic virus and a biocompatible lipid component, wherein:
the composition is an emulsion; and
the lipid component is comprised of fatty acids and/or fatty acid derivatives.

14. The composition or use or method of any of claims 8-13, wherein the lipid component is comprised of fatty acid derivatives and the fatty acid derivatives are selected from among triglycerides, diglycerides, monoglycerides, phospholipids, and mixtures thereof.

15. The composition, use or method of claim 14, wherein the lipid component is comprised of triglycerides and the triglycerides are long-chain triglycerides (LCTs), medium-chain triglycerides (MCTs), or mixtures thereof.

16. The composition, use or method of any of claims 8-15, wherein the lipid component is comprised of a long-chain triglyceride and the long-chain triglyceride is selected from among linoleate, oleate, palmitate, linolenate, stearate and mixtures thereof.

17. The composition, use or method of any of claims 8-15, wherein the lipid component is comprised of a medium-chain triglyceride, and the medium-chain triglyceride is caprylic acid or capric acid.

18. The composition, use or method of any of claims 8-17, wherein the biocompatible lipid component is selected from among plant oil, vegetable oil, animal oil, fish oil, mineral oil, chemically synthesized oil, or mixtures thereof.

19. The composition, use or method of claim 18, wherein the biocompatible lipid component is a plant or vegetable oil, wherein the plant or vegetable oil is selected from among soybean oil, cottonseed oil, safflower oil, corn oil, coconut oil, sesame oil, peanut oil, olive oil, castor oil, and mixtures thereof.

20. The composition, use or method of claim 19, wherein the plant or vegetable oil is soybean oil.

21. The composition, use or method of any of claims 1-20, wherein the oncolytic virus is treated by incubation with a lipid emulsion comprising the biocompatible lipid component to produce a lipid-treated oncolytic virus.

22. The composition of claim 21, wherein the biocompatible lipid component comprises a lipid emulsion that comprises:
a biocompatible lipid component in an amount between 2% and 40%, inclusive, by weight, of the lipid emulsion;
an emulsifier in an amount between 0.2% and 5%, inclusive, by weight, of the lipid emulsion; and
an aqueous phase in an amount between 50% and 98%, inclusive, by weight, of the lipid emulsion.

23. The composition, use or method of claim 22, wherein the emulsifier is a naturally-occurring emulsifier or a synthetic emulsifier.

24. The composition, use or method of claim 23, wherein the emulsifier is a naturally-occurring emulsifier and the naturally-occurring emulsifier is a phospholipid derived from an egg or soy source.

25. The composition, use or method of claim 24, wherein the phospholipid is selected from among egg yolk phospholipids, hydrogenated egg yolk phospholipids, soybean phospholipids, hydrogenated soybean phospholipids, and mixtures thereof.

26. The composition, use or method of claim 25, wherein the emulsifier is an egg yolk phospholipid.

27. The composition, use or method of any of claims 22-26, wherein the aqueous phase of the emulsion is water.

28. The composition, use or method of any of claims 22-27, wherein the lipid emulsion comprises a tonicity modifier in an amount between 0.2% and 5%, inclusive, by weight, of the lipid emulsion.

29. The composition, use or method of claim 28, wherein the tonicity modifier is selected from among glycerin, sodium chloride, potassium chloride, mannitol, sucrose, lactose, fructose, maltose, dextrose, dextrose anhydrous, xylitol, sorbitol, propylene glycol, polyoxyethylated hydrocarbons, and C₆-C₂₀ saturated or unsaturated aliphatic acids.

30. The composition, use or method of claim 28 or claim 29, wherein the tonicity modifier is glycerin.

31. The composition, use or method of any of claims 21-30, wherein the lipid emulsion is an intravenous liquid emulsion (ILE).

32. The composition, use or method of any of claims 21-31, wherein the virus is in a lipid emulsion or treated with a lipid emulsion that comprises:
a biocompatible lipid component in a concentration between 10% and 30%, inclusive, by weight, of the lipid emulsion, wherein the biocompatible lipid component is selected from among soybean oil, safflower oil, olive oil, and mixtures thereof;
an egg yolk phospholipid(s) in a concentration that is at or about 1.2% by weight, of the lipid emulsion;
glycerin in a concentration between 2.25% and 2.5%, inclusive, by weight, of the lipid emulsion; and
water in a concentration that is between 60% and 90%, inclusive, by weight, of the lipid emulsion.

33. The composition, use or method of any of claims 21-32, wherein the virus is in an emulsion that comprises:
10%, 20% or 30% by weight soybean oil;
1.2% by weight egg yolk phospholipid; and
2.5% by weight glycerin.

34. The composition, use or method of any of claims 21-33, wherein the oncolytic virus is incubated with a lipid emulsion comprising the biocompatible lipid component for 30 minutes to 12 hours, 30 minutes to 6 hours, 30 minutes to 4 hours, 30 minutes to 2 hours, 1 hour to 12 hours, 1 hour to 6 hours, 1 hour to 4 hours, 1 hour to 2 hours, 2 hours to 12 hours, 2 hours to 6 hours, 2 hours to 4 hours, 4 hours to 12 hours, 4 hours to 6 hours, or 6 hours to 12 hours.

35. The composition, use or method of claim 34 wherein the incubation is at a temperature that is at or between 0° to 42° C., inclusive, or is at a temperature that is at or about 35° C. to 42° C., or is at or about or at least 37° C.

36. The composition, use or method of any of claims 1-35, wherein composition that comprises the biocompatible lipid, component comprises the oncolytic virus, the biocompatible lipid component, an emulsifier and an aqueous solution.

37. The composition, use or method of any of claims 1-31, wherein the concentration of the biocompatible lipid component is at a weight percentage (wt %) of the composition between 0.001% and 40%, inclusive.

38. The composition, use or method of claim 37, wherein the concentration of the biocompatible lipid component is at a wt % of the composition between 0.001% and 20%, 0.001% and 10%, 0.001% and 5%, 0.001% and 2%, 0.001% and 1%, 0.001% and 0.01%, 0.01% and 20%, 0.01% and 10%, 0.01% and 5%, 0.01% and 2%, 0.01% and 1%, 0.01% and 0.1%, 0.1% and 20%, 0.1% and 10%, 0.1% and 5%, 0.1% and 2%, 0.1% and 1%, 0.5% and 20%, 0.5% and 10%, 0.5% and 5%, 0.5% and 2%, 0.5% and 1%, 2% and 20%, 2% and 10%, 5% and 20%, 5% and 10%, or 10% and 20%, each inclusive.

39. The composition, use or method of any of claims 1-38, wherein:
the virus is treated with or in a composition comprising a biocompatible lipid component;
and the biocompatible lipid component is soybean oil.

40. The composition, use or method of any of claims 1-39, wherein the oncolytic virus is selected from among a Newcastle Disease virus, parvovirus, vaccinia virus, myxoma virus, measles virus, reovirus, vesicular stomatitis virus (VSV), oncolytic adenoviruses, adeno-associated virus, poliovirus, herpes viruses, Sindbis virus and Seneca Valley virus, or a derivative thereof that is modified to contain nucleic acid encoding a heterologous gene product.

41. The composition, use or method of any of claims 1-40, wherein the oncolytic virus is a vaccinia virus.

42. The composition, use or method of claim 41, wherein the vaccinia virus is selected from among Lister, Western Reserve (WR), Copenhagen (Cop), Bern, Paris, Tashkent, Tian Tan, Wyeth (DRYVAX), IHD-J, IHD-W, Brighton, Ankara, CVA382, Modified Vaccinia Ankara (MVA), Dairen I, LC16m8, LC16M0, LIVP, ACAM2000, WR 65-16, Connaught, New York City Board of Health (NYCBH), EM-63 and NYVAC strain.

43. The composition, use or method of claim 41 or claim 42, wherein the vaccinia virus is a Lister strain virus.

44. The composition, use or method of any of claims 1-43, wherein the virus is vaccinia virus that is an LIVP virus or a clonal strain of an LIVP virus or a modified LIVP virus.

45. The composition, use or method of claim 44, wherein the virus is a modified form containing nucleic acid encoding a heterologous gene product.

46. The composition, use or method of claim 45, wherein the heterologous gene product is a therapeutic or reporter gene product.

47. The composition, use or method of claim 45 or claim 46, wherein the heterologous gene product is selected from among an anticancer agent, an antimetastatic agent, an antiangiogenic agent, an immunomodulatory molecule, an antigen, a cell matrix degradative gene, genes for tissue regeneration and reprogramming human somatic cells to pluripotency, enzymes that modify a substrate to produce a detectable product or signal or are detectable by antibodies, proteins that can bind a contrasting agent, genes for optical imaging or detection, genes for PET imaging and genes for MRI imaging.

48. The composition, use or method of any of claims 45-47, wherein the heterologous gene product is a therapeutic agent selected from among a hormone, a growth factor, a cytokine, a chemokine, a costimulatory molecule, a ribozyme, a transporter protein, a single chain antibody, an antisense RNA, a prodrug converting enzyme, an siRNA, a microRNA, a toxin, an antitumor oligopeptide, a mitosis inhibitor protein, an antimitotic oligopeptide, an anti-cancer polypeptide antibiotic, an angiogenesis inhibitor, a tumor suppressor, a cytotoxic protein, a cytostatic protein and a tissue factor.

49. The composition, use or method of any of claims 1-48, wherein the oncolytic virus is in an amount that is between or between about 1×10⁵ and 1×10¹² pfu, 1×10⁶ to 1×10¹⁰ pfu, or 1×10⁷ to 1×10¹⁰ pfu, each inclusive.

50. The composition, use or method of any of claims 1-49, wherein the oncolytic virus is present in the composition in an amount that is at least or about at least or is 1×10⁶, 1×10⁷, 1×10⁸, 1×10⁹, 2×10⁹, 3×10⁹, 4×10⁹, 5×10⁹ pfu, or 1×10¹⁰ pfu.

51. The composition, use or method of any of claims 1-50, comprising an emulsifier.

52. The composition, use or method of claim 36 or claim 51, wherein the emulsifier is a naturally-occurring emulsifier and the naturally-occurring emulsifier is a phospholipid derived from an egg or soy source.

53. The composition, use or method of claim 52, wherein the phospholipid is selected from among egg yolk phospholipids, hydrogenated egg yolk phospholipids, soybean phospholipids, hydrogenated soybean phospholipids, and mixtures thereof.

54. The composition, use or method of claim 53, wherein the emulsifier is an egg yolk phospholipid.

55. The composition, use or method of claim 54, wherein the phospholipid is lecithin (phosphatidylcholine).

56. The composition, use or method of any of claims 52-55, wherein the concentration of the emulsifier as a wt % of the composition is between 0.0002% and 5%, 0.0002% and 2%, 0.0002% and 1%, 0.0002% and 0.2%, 0.0002% and 0.02%, 0.0002% and 0.002%, 0.002% and 2%, 0.002% and 1%, 0.002% and 0.2%, 0.002% and 0.02%, 0.02% and 2%, 0.02% and 1%, 0.02% and 0.2%, 0.2% and 5%, 0.2% and 2%, or 2% and 5%, each inclusive.

57. The composition, use or method of any of claims 1-56, wherein the oncolytic virus is in an emulsion, comprising:
an oncolytic virus in an amount that is between or between about 1×10⁶ to 1×10¹⁰ pfu, inclusive;
a biocompatible lipid component as a wt % of the composition of less than 10%;
an emulsifier as a wt % of the composition of less than 2%;
a tonicity modifier as a wt % of the composition of less than 2%; and
an aqueous solution as a wt % of the composition that is greater than 85%.

58. The composition, use or method of any of claims 1-57, wherein the volume of the composition is from or from about 0.01 mL to 100 mL, 0.1 mL to 100 mL, 1 mL to 100 mL, 10 mL to 100 mL, 0.01 mL to 10 mL, 0.1 mL to 10 mL, 1 mL to 10 mL, 0.02 mL to 20 mL, 0.05 mL to 5 mL, 0.5 mL to 50 mL, or 0.5 mL to 5 mL, each inclusive.

59. The composition, use or method of any of claims 1-58, wherein increased infectivity of the oncolytic virus in the presence of the biocompatible lipid component and/or when co-administered with the antibody is manifested by increased titer or half-life of the oncolytic virus in a bodily fluid compared to the same virus in the absence of the antibody and/or the biocompatible lipid component.

60. The composition, use or method of claim 59, wherein the bodily fluid is serum.

61. The composition, use or method of any of claims 1-60, wherein infectivity is increased at least 1.2-fold, 1.3-fold, 1.4-fold, 1.5-fold, 1.6-fold, 1.7-fold, 1.8-fold, 1.9-fold, 2.0-fold, 2.5-fold, 3-fold, 4-fold, 5-fold, 6-fold, 7-fold, 8-fold, 9-fold, or 10-fold.

62. The composition, use or method of any of claims 1-61, wherein the composition that contains the virus is formulated for direct administration, for local or systemic injection, and/or for intravenous administration.

63. Use of a composition of any of claims 1-3, 8, 9 and 14-62 for treatment of condition treated by the oncolytic virus.

64. The use of claim 63, wherein the condition is a proliferative disorder.

65. The use of claim 63, wherein the condition is a tumor or cancer.

66. A combination, comprising:
a first composition comprising an oncolytic virus; and
a second composition comprising a lipid emulsion, wherein:
the lipid emulsion comprises a biocompatible lipid component, an emulsifier and an aqueous phase.

67. The combination of claim 66, wherein the biocompatible lipid component is at a concentration as a weight percentage of the lipid emulsion of between 2% and 40%, 5% and 40%, or 10% and 30%, each inclusive.
wherein the lipid component is comprised of fatty acids and/or fatty acid derivatives.

68. The combination of claim 66 or claim 67, wherein the lipid component is comprised of fatty acid derivatives and the fatty acid derivatives are selected from among triglycerides, diglycerides, monoglycerides, phospholipids, and mixtures thereof.

69. The combination of claim 68, wherein the lipid component is comprised of triglycerides and the triglycerides are long-chain triglycerides (LCTs), medium-chain triglycerides (MCTs), or mixtures thereof.

70. The combination of claim 69, wherein the lipid component is comprised of a long-chain triglyceride and the long-chain triglyceride is selected from among linoleate, oleate, palmitate, linolenate, stearate and mixtures thereof.

71. The combination of claim 69, wherein the lipid component is comprised of a medium-chain triglyceride, and the medium-chain triglyceride is caprylic acid or capric acid.

72. The combination of any of claims 66-71, wherein the biocompatible lipid component is selected from among plant oil, vegetable oil, animal oil, fish oil, mineral oil, chemically synthesized oil, or mixtures thereof.

73. The combination of claim 72, wherein the biocompatible lipid component is a plant or vegetable oil, wherein the plant or vegetable oil is selected from among soybean oil, cottonseed oil, safflower oil, corn oil, coconut oil, sesame oil, peanut oil, olive oil, castor oil, and mixtures thereof.

74. The combination of claim 73, wherein the plant or vegetable oil is soybean oil.

75. The combination of any of claims 66-74, wherein the concentration of the emulsifier as a weight percentage of the lipid emulsion is between 0.2% and 5%, 0.5% and 4%, or 1% and 3%, each inclusive.

76. The combination of any of claims 66-75, wherein the emulsifier is a naturally-occurring emulsifier or a synthetic emulsifier.

77. The combination of claim 76, wherein the emulsifier is a naturally-occurring emulsifier and the naturally-occurring emulsifier is a phospholipid derived from an egg or soy source.

78. The combination of claim 77, wherein the phospholipid is selected from among egg yolk phospholipids, hydrogenated egg yolk phospholipids, soybean phospholipids, hydrogenated soybean phospholipids, and mixtures thereof.

79. The combination of claim 78, wherein the emulsifier is an egg yolk phospholipid.

80. The combination of claim 79, wherein the egg yolk phospholipid comprises lecithin (phosphatidylcholine).

81. The combination of any of claims 66-80, wherein the concentration of the aqueous solution as a weight percentage of the lipid emulsion is between 50% and 98%, 60% and 90%, or 65% and 80%, each inclusive.

82. The combination of any of claims 66-81, wherein the aqueous phase is water.

83. The combination of any of claims 66-82, wherein the lipid emulsion is an intravenous liquid emulsion (ILE).

84. The combination of claim 83, wherein the lipid emulsion comprises:
a biocompatible lipid component in a concentration between 10% and 30%, inclusive, by weight, of the lipid emulsion, wherein the biocompatible lipid component is selected from among soybean oil, safflower oil, olive oil, and mixtures thereof;
an egg yolk phospholipid(s) in a concentration that is at or about 1.2% by weight, of the lipid emulsion;
glycerin in a concentration between 2.25% and 2.5%, inclusive, by weight, of the lipid emulsion; and
water in a concentration that is between 60% and 90%, inclusive, by weight, of the lipid emulsion.

85. The combination of any of claims 66-84, wherein the liquid emulsion comprises:
10%, 20% or 30% by weight soybean oil;
1.2% by weight egg yolk phospholipid; and
2.5% by weight glycerin.

86. The combination of any of claims 66-85, wherein the oncolytic virus is selected from among a Newcastle Disease virus, parvovirus, vaccinia virus, myxoma virus, measles virus, reovirus, vesicular stomatitis virus (VSV), oncolytic adenoviruses, adeno-associated virus, poliovirus, herpes viruses, Sindbis virus and Seneca Valley virus, or a derivative thereof that is modified to contain nucleic acid encoding a heterologous gene product.

87. The combination of any of claims 66-86, wherein the oncolytic virus is a vaccinia virus.

88. The combination of claim 87, wherein the vaccinia virus is selected from among Lister, Western Reserve (WR), Copenhagen (Cop), Bern, Paris, Tashkent, Tian Tan, Wyeth (DRYVAX), IHD-J, IHD-W, Brighton, Ankara, CVA382, Modified Vaccinia Ankara (MVA), Dairen I, LC16m8, LC16M0, LIVP, ACAM2000, WR 65-16, Connaught, New York City Board of Health (NYCBH), EM-63 and NYVAC strain.

89. The combination of claim 87 or claim 88, wherein the vaccinia virus is a Lister strain virus.

90. The combination of any of claims 87-89, wherein the vaccinia virus is an LIVP virus or a clonal strain of an LIVP virus.

91. The combination of claim 90, wherein the virus is a modified form containing nucleic acid encoding a heterologous gene product.

92. The combination of claim 91, wherein the heterologous gene product is a therapeutic or reporter gene product.

93. The combination of claim 91 or claim 92, wherein the heterologous gene product is selected from among an anticancer agent, an antimetastatic agent, an antiangiogenic agent, an immunomodulatory molecule, an antigen, a cell matrix degradative gene, genes for tissue regeneration and reprogramming human somatic cells to pluripotency, enzymes that modify a substrate to produce a detectable product or signal or are detectable by antibodies, proteins that can bind a contrasting agent, genes for optical imaging or detection, genes for PET imaging and genes for MRI imaging.

94. The combination of any of claims 91-93, wherein the heterologous gene product is a therapeutic agent selected from among a hormone, a growth factor, a cytokine, a chemokine, a costimulatory molecule, a ribozyme, a transporter protein, a single chain antibody, an antisense RNA, a prodrug converting enzyme, an siRNA, a microRNA, a toxin, an antitumor oligopeptide, a mitosis inhibitor protein, an antimitotic oligopeptide, an anti-cancer polypeptide antibiotic, an angiogenesis inhibitor, a tumor suppressor, a cytotoxic protein, a cytostatic protein and a tissue factor.

95. The combination of any of claims 66-94, wherein the oncolytic virus is present in the composition in an amount that is between or between about 1×10⁵ and 1×10¹² pfu, 1×10⁶ to 1×10¹⁰ pfu, or 1×10⁷ to 1×10¹⁰ pfu, each inclusive.

96. The combination of any of claims 66-95, wherein the oncolytic virus is present in the composition in an amount that is at least or about at least or 1×10⁶, 1×10⁷, 1×10⁸, 1×10⁹, 2×10⁹, 3×10⁹, 4×10⁹, 5×10⁹ pfu, or 1×10¹⁰ pfu.

97. The combination of any of claims 66-96, wherein the volume of the composition comprising the oncolytic virus is from or from about 0.01 mL to 100 mL, 0.1 mL to 100 mL, 1 mL to 100 mL, 10 mL to 100 mL, 0.01 mL to 10 mL, 0.1 mL to 10 mL, 1 mL to 10 mL, 0.02 mL to 20 mL, 0.05 mL to 5 mL, 0.5 mL to 50 mL, or 0.5 mL to 5 mL, each inclusive.

98. The combination of any of claims 66-97, comprising a further composition comprising an additional active agent.

99. A combination, comprising:
a first composition that is a composition of any of claims 10-62 or a first composition comprising an oncolytic virus; and
a second composition comprising an additional active agent, wherein the first and second compositions are separate or are combined so that the additional active agent is in the first composition.

100. The combination of claim 98 or claim 99, wherein the additional active agent is selected from among a therapeutic compound, an agent that increases virus infectivity, a therapeutic or diagnostic virus, an antiviral or chemotherapeutic agent, or an agent or compound for modulation of gene expression of endogenous or heterologous genes encoded by the virus.

101. The combination of claim 100, wherein the additional agent is a therapeutic compound that is an anti-cancer agent.

102. The combination of claim 100 or claim 101, wherein the therapeutic compound is selected from among a cytokine, growth factor, photosensitizing agent, radionuclide, toxin, siRNA molecule, enzyme/pro E drug pair, anti-metabolite, signaling modulator, anti-cancer antibiotic, anti-cancer antibody, angiogenesis inhibitor, chemotherapeutic compound, antimetastatic compound or a combination of any thereof.

103. The combination of any of claims 98-101, wherein the additional agent is an agent that increases the infectivity of the virus and is a complement inhibitor.

104. The combination of claim 103, wherein the complement inhibitor inhibits activity of C1, C2, C3, C4, C5, C5a, C5aR, C3aR, Factor B, Factor P, C1q or MBP.

105. The combination of claim 103 or claim 104, wherein the complement inhibitor is selected from among cobra venom factor (CVF), heparin, TA 106, TNX-234, anti-properdin, C1-INH, a compstatin or derivative or analog thereof, soluble CR1, K76COOH, eculizumab, pexelizumab, TSA12/22, MSA12/22, ARC 1005, TNX-558, NOX-D19, PMX-53, PMX-201, PMX-205, neutrazumab, and variants, analogs or derivatives thereof that inhibit complement activity.

106. The combination of claim 103 or claim 104, wherein the complement inhibitor is an anti-C5 antibody.

107. The combination of claim 106, wherein the anti-C5 antibody is selected from among eculizumab, pexelizumab, TSA12/22 or MB12/122, or a variant thereof.

108. The combination of claim 107, wherein the anti-C5 antibody is eculizumab.

109. A combination, comprising:
a first composition comprising an oncolytic virus; and
a second composition comprising an anti-C5 antibody.

110. The composition of claim 10 or combination of claim 109, wherein the oncolytic virus is selected from among a Newcastle Disease virus, parvovirus, vaccinia virus, myxoma virus, measles virus, reovirus, vesicular stomatitis virus (VSV), oncolytic adenoviruses, adeno-associated virus, poliovirus, herpes viruses, Sindbis virus and Seneca Valley virus, or a derivative thereof that is modified to contain nucleic acid encoding a heterologous gene product.

111. The composition or combination of any of claims 10, 109 and 110, wherein the oncolytic virus is a vaccinia virus.

112. The composition or combination of claim 111, wherein the vaccinia virus is selected from among Lister, Western Reserve (WR), Copenhagen (Cop), Bern, Paris, Tashkent, Tian Tan, Wyeth (DRYVAX), IHD-J, IHD-W, Brighton, Ankara, CVA382, Modified Vaccinia Ankara (MVA), Dairen I, LC16m8, LC16M0, LIVP, ACAM2000, WR 65-16, Connaught, New York City Board of Health (NYCBH), EM-63 and NYVAC strain.

113. The composition or combination of claim 111 or claim 112, wherein the vaccinia virus is a Lister strain virus.

114. The composition or combination of any of claims 111-113, wherein the vaccinia virus is an LIVP virus or a clonal strain of an LIVP virus.

115. The composition or combination of claim 114, wherein the virus is a modified form containing nucleic acid encoding a heterologous gene product.

116. The composition or combination of claim 115, wherein the heterologous gene product is a therapeutic or reporter gene product.

117. The composition or combination of claim 116 or claim 117, wherein the heterologous gene product is selected from among an anticancer agent, an antimetastatic agent, an antiangiogenic agent, an immunomodulatory molecule, an antigen, a cell matrix degradative gene, genes for tissue regeneration and reprogramming human somatic cells to pluripotency, enzymes that modify a substrate to produce a detectable product or signal or are detectable by antibodies, proteins that can bind a contrasting agent, genes for optical imaging or detection, genes for PET imaging and genes for MRI imaging.

118. The composition or combination of any of claims 115-117, wherein the heterologous gene product is a therapeutic agent selected from among a hormone, a growth factor, a cytokine, a chemokine, a costimulatory molecule, a ribozyme, a transporter protein, a single chain antibody, an antisense RNA, a prodrug converting enzyme, an siRNA, a microRNA, a toxin, an antitumor oligopeptide, a mitosis inhibitor protein, an antimitotic oligopeptide, an anti-cancer polypeptide antibiotic, an angiogenesis inhibitor, a tumor suppressor, a cytotoxic protein, a cytostatic protein and a tissue factor.

119. The composition or combination of any of claims 10 and 109-118, wherein the oncolytic virus is present in the composition or combination in an amount that is between or between about 1×10⁵ and 1×10¹² pfu, 1×10⁶ to 1×10¹⁰ pfu, or 1×10⁷ to 1×10¹⁰ pfu, each inclusive.

120. The composition or combination of any of claims 10 and 109-119, wherein the oncolytic virus is present in the composition in an amount that is at least or about at least or 1×10⁶, 1×10⁷, 1×10⁸, 1×10⁹, 2×10⁹, 3×10⁹, 4×10⁹, 5×10⁹ pfu, or 1×10¹⁰ pfu.

121. The composition or combination of any of claims 10 and 109-120, wherein the volume of the composition comprising the oncolytic virus is from or from about 0.01 mL to 100 mL, 0.1 mL to 100 mL, 1 mL to 100 mL, 10 mL to 100 mL, 0.01 mL to 10 mL, 0.1 mL to 10 mL, 1 mL to 10 mL, 0.02 mL to 20 mL, 0.05 mL to 5 mL, 0.5 mL to 50 mL, or 0.5 mL to 5 mL, each inclusive.

122. The composition, use, method or combination of any of claims 1-12 and 106-121, wherein the anti-C5 antibody specifically binds to complement component 5 (C5) with a binding affinity such that the dissociation constant is less than or equal to 10⁻⁶, 10⁻⁷, 10⁻⁸, 10⁻⁹, 10⁻¹⁰, 10⁻¹¹, or 10⁻¹²M.

123. The composition, use, method or combination of any of claims 1-12 and 106-122, wherein the anti-C5 antibody specifically binds the alpha chain of C5.

124. The composition, use, method or combination of any of claims 1-12 and 106-123, wherein the anti-C5 antibody is selected from among eculizumab, pexelizumab, TSA12/22 or MB12/122, or a variant thereof that specifically binds C5.

125. The composition, use, method or combination of claim 124, wherein the anti-C5 antibody is eculizumab.

126 The composition, use, method or combination of any of claims 1-12 and 106-122, wherein the anti-C5 antibody specifically binds the beta chain of C5.

127. The composition, use, method or combination of any of claims 1-12 and 1-106-126, wherein the amount of the anti-C5 antibody in the composition, when formulated for single dosage administration is between or between about 1 mg to 5000 mg, 10 mg to 5000 mg, 100 mg to 5000 mg, 100 mg to 2500 mg, 100 mg to 1000 mg, 100 mg to 500 mg, 500 mg to 5000 mg, 500 mg to 2500 mg, 500 mg to 1000 mg, 1000 mg to 2500 mg, 2000 mg to 5000 mg, or 1500 mg to 2500 mg, each inclusive.

128. The composition, use, method or combination of any of claims 1-12 and 106-127, wherein the amount of the anti-C5 antibody in the composition, when formulated for single dosage administration, is at least or about at least or about 100 mg, 200 mg, 300 mg, 400 mg, 500 mg, 600 mg, 700 mg, 800 mg, 900 mg or 1000 mg.

129. The composition, use, method or combination of any of claims 1-12 and 99-128, wherein the volume of the composition comprising the oncolytic virus is from or from about 0.01 mL to 100 mL, 0.1 mL to 100 mL, 1 mL to 100 mL, 10 mL to 100 mL, 0.01 mL to 10 mL, 0.1 mL to 10 mL, 1 mL to 10 mL, 0.02 mL to 20 mL, 0.05 mL to 5 mL, 0.5 mL to 50 mL, or 0.5 mL to 5 mL, each inclusive.

130. The composition, use, method or combination of any of claims 1-12 and 103-129, wherein the virus exhibits increased infectivity that is manifested by increased titer or half-life of the oncolytic virus when exposed to a bodily fluid.

131. The composition, use, method or combination of claim 130, wherein the bodily fluid is serum.

132. The composition, use, method or combination of claim 130 or claim 131, wherein infectivity is increased at least 1.2-fold, 1.3-fold, 1.4-fold, 1.5-fold, 1.6-fold, 1.7-fold, 1.8-fold, 1.9-fold, 2.0-fold, 2.5-fold, 3-fold, 4-fold, 5-fold, 6-fold, 7-fold, 8-fold, 9-fold, or 10-fold.

133. A method of increasing infectivity of an oncolytic virus, comprising contacting an oncolytic virus in vitro with a biocompatible lipid component for a sufficient time to produce a lipid-treated virus, wherein the lipid-treated virus exhibits increased infectivity for a target cell compared to the oncolytic virus in the absence of contacting with the biocompatible lipid component comprised of fatty acids and/or fatty acid derivatives.

134. A method of treating a disease or condition in a subject treatable by an oncolytic virus, comprising:
a) contacting an oncolytic virus in vitro with a biocompatible lipid component for a sufficient time to produce a lipid-treated virus composition, wherein the lipid-treated virus exhibits increased infectivity for a target cell compared to the oncolytic virus in the absence of contacting with the biocompatible lipid component, wherein biocompatible lipid component is comprised of fatty acids and/or fatty acid derivatives; and
b) administering the lipid-treated virus composition to the subject.

135. The method of claim 133 or claim 134, wherein the oncolytic virus is contacted with a biocompatible lipid component for 30 minutes to 12 hours, 30 minutes to 6 hours, 30 minutes to 4 hours, 30 minutes to 2 hours, 1 hour to 12 hours, 1 hour to 6 hours, 1 hour to 4 hours, 1 hour to 2 hours, 2 hours to 12 hours, 2 hours to 6 hours, 2 hours to 4 hours, 4 hours to 12 hours, 4 hours to 6 hours, or 6 hours to 12 hours.

136. The method of claim 135, wherein the contacting is at a temperature that is at or between 0° to 42° C., inclusive.

137. The method of any of claims 133-136, wherein the lipid component is comprised of fatty acid derivatives and the fatty acid derivatives are selected from among triglycerides, diglycerides, monoglycerides, phospholipids, and mixtures thereof.

138. The method of claim 137, wherein the lipid component is comprised of triglycerides and the triglycerides are long-chain triglycerides (LCTs), medium-chain triglycerides (MCTs), or mixtures thereof.

139. The method of claim 138, wherein the lipid component is comprised of a long-chain triglyceride and the long-chain triglyceride is selected from among linoleate, oleate, palmitate, linolenate, stearate and mixtures thereof.

140. The method of claim 138, wherein the lipid component is comprised of a medium-chain triglyceride, and the medium-chain triglyceride is caprylic acid or capric acid.

141. The method of any of claims 133-140, wherein the biocompatible lipid component is selected from among plant oil, vegetable oil, animal oil, fish oil, mineral oil, chemically synthesized oil, or mixtures thereof.

142. The method of claim 141, wherein the biocompatible lipid component is a plant or vegetable oil, wherein the plant or vegetable oil is selected from among soybean oil, cottonseed oil, safflower oil, corn oil, coconut oil, sesame oil, peanut oil, olive oil, castor oil, and mixtures thereof.

143. The method of claim 142, wherein the plant or vegetable oil is soybean oil.

144. The method of any of claims 133-143, wherein the biocompatible lipid component is a lipid emulsion comprising the biocompatible lipid component.

145. The method of claim 144, wherein the lipid emulsion comprises:
a biocompatible lipid component in an amount between 2% and 40%, inclusive, by weight, of the lipid emulsion;
an emulsifier in an amount between 0.2% and 5%, inclusive, by weight, of the lipid emulsion; and
an aqueous phase in an amount between 50% and 98%, inclusive, by weight, of the lipid emulsion.

146. The method of claim 145, wherein the emulsifier is a naturally-occurring emulsifier or a synthetic emulsifier.

147. The method of claim 146, wherein the emulsifier is a naturally-occurring emulsifier and the naturally-occurring emulsifier is a phospholipid derived from an egg or soy source.

148. The method of claim 147, wherein the phospholipid is selected from among egg yolk phospholipids, hydrogenated egg yolk phospholipids, soybean phospholipids, hydrogenated soybean phospholipids, and mixtures thereof.

149. The method of claim 148, wherein the emulsifier is an egg yolk phospholipid.

150. The method of any of claims 145-149, wherein the aqueous phase is water.

151. The method of any of claims 133-150, wherein the lipid emulsion is an intravenous liquid emulsion (ILE).

152. The method of any of claims 133-151, wherein the lipid emulsion comprises:
a biocompatible lipid component in a concentration between 10% and 30%, inclusive, by weight, of the lipid emulsion, wherein the biocompatible lipid component is selected from among soybean oil, safflower oil, olive oil, and mixtures thereof;
an egg yolk phospholipid(s) in a concentration that is at or about 1.2% by weight, of the lipid emulsion;
glycerin in a concentration between 2.25% and 2.5%, inclusive, by weight, of the lipid emulsion; and
water in a concentration that is between 60% and 90%, inclusive, by weight, of the lipid emulsion.

153. The method of any of claims 133-152, wherein the lipid emulsion comprises:
10%, 20% or 30% by weight soybean oil;
1.2% by weight egg yolk phospholipid; and
2.5% by weight glycerin.

154. The method of any of claims 133-153, wherein the oncolytic virus is selected from among a Newcastle Disease virus, parvovirus, vaccinia virus, myxoma virus, measles virus, reovirus, vesicular stomatitis virus (VSV), oncolytic adenoviruses, adeno-associated virus, poliovirus, herpes viruses, Sindbis virus and Seneca Valley virus, or a derivative thereof that is modified to contain nucleic acid encoding a heterologous gene product.

155. The method of any of claims 133-155, wherein the oncolytic virus is a vaccinia virus.

156. The method of claim 155, wherein the vaccinia virus is selected from among Lister, Western Reserve (WR), Copenhagen (Cop), Bern, Paris, Tashkent, Tian Tan, Wyeth (DRYVAX), IHD-J, IHD-W, Brighton, Ankara, CVA382, Modified Vaccinia Ankara (MVA), Dairen I, LC16m8, LC16M0, LIVP, ACAM2000, WR 65-16, Connaught, New York City Board of Health (NYCBH), EM-63 and NYVAC strain.

157. The method of claim 155 or claim 156, wherein the virus is vaccinia virus that is a Lister strain virus.

158. The method of any of claims 155-157, wherein the vaccinia virus is an LIVP virus or a clonal strain of an LIVP virus.

159. The method of claim 158, wherein the virus is a modified form containing nucleic acid encoding a heterologous gene product.

160. The method of claim 159, wherein the heterologous gene product is a therapeutic or reporter gene product.

161. The method of claim 159 or claim 160, wherein the heterologous gene product is selected from among an anticancer agent, an antimetastatic agent, an antiangiogenic agent, an immunomodulatory molecule, an antigen, a cell matrix degradative gene, genes for tissue regeneration and reprogramming human somatic cells to pluripotency, enzymes that modify a substrate to produce a detectable product or signal or are detectable by antibodies, proteins that can bind a contrasting agent, genes for optical imaging or detection, genes for PET imaging and genes for MRI imaging.

162. The method of any of claims 159-161, wherein the heterologous gene product is a therapeutic agent selected from among a hormone, a growth factor, a cytokine, a chemokine, a costimulatory molecule, a ribozyme, a transporter protein, a single chain antibody, an antisense RNA, a prodrug converting enzyme, an siRNA, a microRNA, a toxin, an antitumor oligopeptide, a mitosis inhibitor protein, an antimitotic oligopeptide, an anti-cancer polypeptide antibiotic, an angiogenesis inhibitor, a tumor suppressor, a cytotoxic protein, a cytostatic protein and a tissue factor.

163. A method of treating a disease or condition in a subject treatable by an oncolytic virus, comprising administering the composition or combination of any of claims 10-62 and 99-132.

164. The method of claim 163, wherein the composition comprising the oncolytic virus is administered to deliver at least 1×10⁵ pfu virus, 1×10⁶ pfu virus, 1×10⁷ pfu virus, 1×10⁸ pfu virus, 1×10⁹ pfu virus, 1×10¹⁰ pfu virus, 1×10¹¹ pfu virus, or 1×10¹² pfu virus.

165. The method of claim 163, wherein the composition comprising the oncolytic virus is administered to deliver between 1×10⁸ pfu virus and 1×10¹⁰ pfu virus, inclusive.

166. A method of treating a disease or condition in a subject treatable by an oncolytic virus, comprising administering the combination of any of claims 66-98.

167. The method of claim 166, wherein the composition comprising the lipid emulsion is administered prior to, simultaneously, intermittently or subsequently from administration of the composition comprising the oncolytic virus.

168. The method of claim 166 or claim 167, wherein the composition comprising the lipid emulsion is administered prior to administration of the composition comprising the oncolytic virus.

169. The method of claim 168, wherein the composition comprising the lipid emulsion is administered 5 minutes to 6 hours, 5 minutes to 4 hours, 5 minutes to 2 hours, 5 minutes to 1 hour, 5 minute to 30 minutes, 30 minutes to 6 hours, 30 minutes to 4 hours, 30 minutes to 2 hours, 30 minutes to 1 hour, 1 hour to 6 hours, 1 hour to 4 hours, 1 hour to 2 hours, 2 hours to 6 hours, 2 hours to 4 hours, or 4 hours to 6 hours prior to administration of the composition comprising the oncolytic virus.

170. The method of claim 168 or claim 169, wherein the composition comprising the lipid emulsion is administered at least 30 minutes prior to administration of the composition comprising the oncolytic virus.

171. The method of any of claims 166-170, wherein the lipid emulsion is administered in an amount to deliver 1 gram (g) to 50 g, 1 g to 40 g, 1 g to 30 g, 1 g to 20 g, 1 g to 10 g, 1 g to 5 g, 5 g to 50 g, 5 g to 40 g, 5 g to 30 g, 5 g to 20 g, 5 g to 10 g, 10 g to 50 g, 10 g to 40 g, 10 g to 30 g, 10 g to 20 g, 20 g to 50 g, 20 g to 40 g, or 20 g to 30 g of the biocompatible lipid component.

172. The method of any of claims 166-171, wherein 1 mL to 500 mL, 1 mL to 200 mL, 1 mL to 100 mL, 1 mL to 50 mL, 50 mL to 500 mL, 50 mL to 200 mL, 50 mL to 100 mL, 100 mL to 500 mL, 100 mL to 200 mL, or 200 mL to 500 mL of lipid emulsion composition is administered.

173. The method of any of claims 166-172, wherein at least or about at least 100 mL of lipid emulsion composition is administered.

174. The method of any of claims 166-173, further comprising administering a complement inhibitor.

175. The method of claim 174, wherein the complement inhibitor inhibits activity of C1, C2, C3, C4, C5, C5a, C5aR, C3aR, Factor B, Factor P, C1q or MBP.

176. The method of claim 174 or claim 175, wherein the complement inhibitor is selected from among cobra venom factor (CVF), heparin, TA 106, TNX-234, anti-properdin, C1-INH, a compstatin or derivative or analog thereof, soluble CR1, K76COOH, eculizumab, pexelizumab, TSA12/22, MSA12/22, ARC 1005, TNX-558, NOX-D19, PMX-53, PMX-201, PMX-205, neutrazumab, and variants, analogs or derivatives thereof that inhibit a complement activity.

177. The method of any of claims 174-176, wherein the complement inhibitor is an anti-C5 antibody.

178. A method of treating a disease or condition in a subject treatable by an oncolytic virus, comprising administering the combination of any of claims 109-132.

179. The method of any of claims 174-178, wherein the composition comprising the complement inhibitor or anti-C5 antibody is administered prior to, simultaneously, intermittently or subsequently from administration of the composition comprising the oncolytic virus.

180. The method of any of claims 174-179, wherein the composition comprising the complement inhibitor or anti-C5 antibody is administered prior to administration of the composition comprising the oncolytic virus.

181. The method of claim 180, wherein the composition comprising the complement inhibitor or anti-C5 antibody is administered 5 minutes to 6 hours, 5 minutes to 4 hours, 5 minutes to 2 hours, 5 minutes to 1 hour, 5 minute to 30 minutes, 30 minutes to 6 hours, 30 minutes to 4 hours, 30 minutes to 2 hours, 30 minutes to 1 hour, 1 hour to 6 hours, 1 hour to 4 hours, 1 hour to 2 hours, 2 hours to 6 hours, 2 hours to 4 hours, or 4 hours to 6 hours prior to administration of the composition comprising the oncolytic virus.

182. The method of claim 180 or claim 181, wherein the composition comprising the complement inhibitor or anti-C5 antibody is administered at least 30 minutes prior to administration of the composition comprising the oncolytic virus.

183. A method of treating a disease or condition in a subject treatable by an oncolytic virus, comprising administering the composition of any of claims 10-12 and 109-132.

184. The method of claim 183, wherein the anti-C5 antibody is selected from among eculizumab, pexelizumab, TSA12/22 or MB12/122, or a variant thereof.

185. The method of claim 184, wherein the anti-C5 antibody is eculizumab.

186. The method of any of claims 183-185, wherein the disease or condition is a proliferative disorder.

187. The method of any of claims 183-185, wherein the disease or condition is a cancer, tumor or metastasis.

188. The method of claim 187, wherein the disease or condition is a cancer and the cancer is a carcinoma, sarcoma, lymphoma or leukemia.

189. The method of claim 187, wherein the disease or condition is a tumor and the tumor is a solid tumor.

190. The method of any of claims 183-189, wherein the disease or condition is a cancer and the cancer is a cancer of the tongue, mouth, throat, stomach, cecum, colon, rectum, breast, ovary, uterus, thyroid, adrenal cortex, lung, kidney, prostate or pancreas.

191. The method of any of claims 183-190, wherein the subject is a human or non-human animal.

192. The method of claim 191, wherein the subject is a non-human animal and the non-human animal is selected from among a horse, cat, dog, cow, pig, sheep, goat, mouse, rabbit, chicken, rat, and guinea pig.

193. A composition or combination of any of claims 10-132 for use in treating a disease or condition that is one that is treatable by an oncolytic virus.

194. Use of a composition or combination of any of claims 10-132 formulated as a medicament for treating a disease or condition that is treated by an oncolytic virus.

195. The combination or composition of claim 193 or use of claim 194, wherein, when the combination is administered to a subject, the anti-C5 antibody is administered prior to the oncolytic virus.

196. The composition, combination or use of any of claims 193-195, wherein the disease of condition is a proliferative disorder.

197. The composition, combination or use of claim 196, wherein the proliferative disease is cancer.

198. The composition, combination or use of claim 197, wherein the cancer is a carcinoma, sarcoma, lymphoma or leukemia.

199. The composition, combination or use of claim 197 or claim 198, wherein the cancer is a cancer of the tongue, mouth, throat, stomach, cecum, colon, rectum, breast, ovary, uterus, thyroid, adrenal cortex, lung, kidney, prostate or pancreas.

200. The composition, combination or use of any of claims 193-199, wherein the disease or condition is a tumor or a metastasis.

201. The composition, combination or use of claim 200, wherein the tumor is a solid tumor.

202. The composition, use, method or combination of any of claims 1-12 and 106-132, wherein the oncolytic virus exhibits increased binding to blood cells compared to in the absence of the anti-C5 antibody.

203. The composition, use, method or combination of claim 202, wherein binding to blood cells is increased at least 1.2-fold, 1.3-fold, 1.4-fold, 1.5-fold, 1.6-fold, 1.7-fold, 1.8-fold, 1.9-fold, 2.0-fold, 2.5-fold, 3-fold, 4-fold, 5-fold, 6-fold, 7-fold, 8-fold, 9-fold, or 10-fold.

The application's sequence listing, which the Patent Office published only in electronic form, follows.

SEQUENCE LISTING (52 sequences)

SEQ ID NO: 1 - DNA, 186854 bp, Vaccinia virus
  LIVP complete genome
ttccactatctgtggtacgaacggtttcatcttctttgatgccatcacccagatgttctataaacttggtatcctcgtccgatttcatatcctttgccaaccaatacatatagctaaactcaggcatatgttccacacatcctgaacaatgaaattctccagaagatgttacaatgtctagatttggacatttggtttcaaccgcgttaacatatgagtgaacacacccatacatgaaagcgatgagaaataggattctcatcttgccaaaatatcactagaaaaaatttatttatcaattttaaaggtataaaaaatacttattgttgctcgaatattttgtatttgatggtatacggaagattagaaatgtaggtattatcatcaactgattctatggttttatgtattctatcatgtttcactattgcgttggaaataatatcatatgcttccacatatattttattttgttttaactcataatactcacgtaattctggattattggcatatctatgaataattttagctccatgatcagtaaatattaatgagaacatagtattaccacctaccattatttttttcatctcattcaattcttaattgcaaagatctatataatcattatagcgttgacttatggactctggaatcttagacgatgtacagtcatctataatcatggcatatttaatacattgttttatagcatagtcgttatctacgatgttagatatttctctcaatgaatcaatcacacaatctaatgtaggtttatgacataatagcattttcagcagttcaatgtttttagattcgttgatggcaatggctatacatgtatatccgttatttgatctaatgttgacatctgaaccggattctagcagtaaagatactagagattgtttattatatctaacagccttgtgaagaagtgtttctcctcgtttgtcaatcatgttaatgtctttaagataaggtaggcaaatgtttatagtactaagaattgggcaagcataagacatgtcacaaagacccttttttgtatgtataagtgtaaaaattataacatccatagttggatttacataggtgtccaatcgggatctctccatcatcgagataattgatggcatctcccttccttttttagtagatatttcatcgtgtaagaatcaatattaatatttctaaagtatccgtgtatagcctctttatttaccacagctccatattccactagagggatatcgccgaatgtcatatactcaattagtatatgttggaggacatccgagttcattgttttcaatatcaaagagatggtttccttatcatttctccatagtggtacaatactacacattattccgtgcggctttccattttccaaaaacaatttgaccaaatctaaatctacatctttattgtatctataatcactatttagataatcagccataattcctcgagtgcaacatgttagatcgtctatatatgaataagcagtgttatctattcctttcattaacaatttaacgatgtctatatctatatgagatgacttaatataatattgaagagctgtacaatagtttttatctataaaagacggcttgattccgtgattaattagacatttaacaacttccggacgcacatatgctctcgtatccgactctgaatacagatgagagatgatatacagatgcaatacggtaccgcaatttcgtagttgataatcatcatacgcgtatcagtactcgtcctcataaagaacactgcagccattttctatgaacaaatcaataattttagaaacaggatcattgtcattacataattttctataactgaacgatggttttcacatttaacactcaagtcaaatccatgttctaccaacacctttatcaagtcaacgtctacatttttggatttcatatagctgaatatattaaagttatttatgttgctaaatccagtggcttctagtagagccatcgctatatccttattaactttaacatgtctactatttgtgtattcttctaatggggtaagctgtctccaatttttgcgtaatggattagtgccactgtctagtagtagtttgacgacctcgacattattacaatgctcattaaaaaggtatgcgtgtaaagcattattcttgaattggttcctggtatcattaggatctctgtctttcaacatctgtttaagttcatcaagagccacctcctcattttccaaatagtcaaacattttgactgaatgagctactgtgaactctatacacccacacaactaatgtcattaaatatcatgtcaaaaacttgtacaattattaataaaaataatttagtgtttaaattttaccagttccagattttacacctccgttaatacctccattaaccccactggacgatcctcctccccacattccaccgccaccagatgtataagttttagatcctttattactaccatcatgtccatggataaagacactccacatgccgccactaccccctttagaagacatattaataagacttaaggacaagtttaacaataaaattaatcacgagtaccctactaccaacctacactattatatgattatagtttctatttttacagtaccttgactaaagtttctagtcacaagagcaatactaccaacctacactattatatgattatagtttctatttttataggaacgcgtacgagaaaatcaaatgtctaatttctaacggtagtgttgataaacgattgttatccgcggatacctcctctatcatgtcgtctattttcttactttgttctattaacttattagcattatatattatttgattataaaacttatattgcttattagcccaatctgtaaatatcggattattaacatatcgtttctttgtaggtttatttaacatgtacatcactgtaagcatgtccttaccatttattttaatttgacgcatatccgcaatttctttttcgcagtcggttataaattctatatatgatggatacatgctacatgtgtacttataatcgactaatatgaagtacttgatacatattttcagtaacgatttattattaccacctatgaataagtacctgtgatcgtctaggtaatcaactgttttcttaatacattcgatggttggtaatttactcagaataatttccaatatcttaatatataattctgctatttctgggatatatttatctgccagtataacacaaatagtaatacatgtaaacccatattttgttattatattaatgtctgcgccattatctattaaccattctactaggctgacactatgcgactcaatacaatgataaagtatactacatccatgtttatctattttgtttatatcatcaatatacggcttacaaagttttagtatcgataacacatccaactcacgcatagagaaggtagggaataatggcataatatttattaggttatcatcattgtcattatctacaactaagtttccattttttaaaatatactcgacaactttaggatctctattgccaaatttttgaaaatatttatttatatgcttaaatctatataatgtagctccttcatcaatcatacatttaataacattgatgtatactgtatgataagatacatattctaacaatagatcttgtatagaatctgtatatcttttaagaattgtggatattaggatattattacataaactattacacaattctaaaatataaaacgtatcacggtcgaataatagttgatcaactatataattatcgattttgtgatttttcttcctaaactgtttacgtaaatagttagatagaatattcattagttcatgaccactatagttactatcgaataacgcgtcaaatatttcccgtttaatatcgcatttgtcaagataataatagagtgtggtatgttcacgataagtataataacgcatctctttttcgtgtgaaattaaatagtttattacgtccaaagatgtagcataaccatcttgtgacctagtaataatataataatagagaactgttttacccattctatcatcataatcagtggtgtagtcgtaatcgtaatcgtctaattcatcatcccaattataatattcaccagcacgtctaatctgttctattttgatcttgtatccatactgtatgttgctacatgtaggtattcctttatccaataatagtttaaacacatctacattgggatttgatgttgtagcgtatttttctacaatattaataccatttttgatactatttatttctatacctttcgaaattagtaatttcaataagtctatattgatgttatcagaacatagatattcgaatatatcaaaatcattgatatttttatagtcgactgacgacaataacaaaatcacaacatcgtttttgatattattatttttcttggtaacgtatgcctttaatggagtttcaccatcatactcatataatggatttgcaccactttctatcaatgattgtgcactgctggcatcgatgttaaatgttttacaactatcatagagtatcttatcgttaaccatgattggttgttgatgctatcgcattttttggtttctttcatttcagttatgtatggatttagcacgtttgggaagcatgagctcatatgatttcagtactgtagtgtcagtactattagtttcaataagatcaatctctagatctatagaatcaaaacacgataggtcagaagataatgaatatctgtaggcttcttgttgtactgtaacttctggttttgttagatggttgcatcgtgctttaacgtcaatggtacaaattttatcctcgctttgtgtatcatattcgtccctactataaaattgtatattcagattatcatgcgatgtgtatacgctaacggtatcaataaacggagcacaccatttagtcataaccgtaatccaaaaatttttaaagtatatcttaacgaaagaagttgtgtcattgtctacggtgtatggtactagatcctcataagtgtatatatctagagtaatgtttaatttattaaatggttgataatatggatcctcgtgacaatttccgaagatggaaataagacataaacacgcaataaatctaattgcggacatggttactccttaaaaaaatacgaataatcaccttggctatttagtaagtgtcatttaacactatactcatattaatccatggactcataatctctatacgggattaacggatgttctatatacggggatgagtagttctcttctttaactttatactttttactaatcatatttagactgatgtatgggtaatagtgtttgaagagctcgttctcatcatcagaataaatcaatatctctgtttttttgttatacagatgtattacagcctcatatattacgtaatagaacgtgtcatctaccttattaactttcaccgcatagttgtttgcaaatacggttaatcctttgacctcgtcgatttccgaccaatctgggcgtataatgaatctaaactttaattgcttgtaatcattcgaaataatttttagtttgcatccgtagttatcccctttatgtaactgtaaatttctcaacgcgatatctccattaataatgatgtcgaattcgtgctgtatacccatactgaatggatgaacgaataccgacggcgttaatagtaatttactttttcatctttacatattgggtactagttttactatcataagtttataaattccacaagctactatggaataagccaaccatcttagtataccacacatgtcttaaagtttattaattaattacatgttgttttatatatatcgctacgaatttaaagagaaattagtttaggaagaaaaattatctatctacatcatcacgtctctgtattctacgatagagtgctactttaagatgcgacagatccgtgtcatcaaatatatactccattaaaatgattattccggcagcgaacttgatattggatatatcacaacctttgttaatatctacgacaatagacagcagtcccatggttccataaacagtgagtttatctttctttgaagagatattttgtagagatcttataaaactgtcgaatgacatcgcatttatatctttagctaaatcgtatatgttaccatcgtaatatctaaccgcgtctatcttaaacgtttccatcgctttaaagacgtttccgatagatggtctcatttcatcagtcatactgagccaacaaatataatcgtgtataacatctttgatagaatcagactctaaagaaaacgaatcggctttattatacgcattcatgataaacttaatgaaaaatgtttttcgttgtttaagttggatgaatagtatgtcttaataattgttattatttcattaattaatatttagtaacgagtacactctataaaaacgagaatgacataactaatcataactagttatcaaagtgtctaggacgcgtaattttcatatggtatagatcctgtaagcattgtctgtattctggagctattttctctatcgcattagtgagttcagaatatgttataaatttaaatcgaataacgaacataactttagtaaagtcgtctatattaactcttttattttctagccatcgtaataccatgtttaagatagtatattctctagttactacgatctcatcgttgtctagaatatcacatactgaatctacatccaattttagaaattggtctgtgttacatatctcttctatattattgttgatgtattgtcgtagaaaactattacgtagaccattttctttataaaacgaatatatagtactccaattatctttaccgatatatttgcacacataatccattctctcaatcactacatctttaagattttcgttgttaagatatttggctaaactatataattctattagatcatcaacagaatcagtatatatttttctagatccaaagacgaactctttggcgtcctctataatattcccagaaaagatattttcgtgttttagtttatcgagatctgatctgttcatatacgccatgattgtacggtacgttatgataaccgcataaaataaaaatccattttcatttttaaccaatactattcataattgagattgatgtaatactttgttactttgaacgtaaagacagtacacggatccgtatctccaacaagcacgtagtaatcaaatttggtgttgttaaacttcgcaatattcatcaatttagatagaaacttatactcatcatctgttttaggaatccatgtattattaccactttccaacttatcattatcccaggctatgtttcgtccatcatcgttgcgcagagtgaataattcttttgtattcggtagttcaaatatatgatccatgcatagatcggcaaagctattgtagatgtgatttttcctaaatctaatataaaactcgtttactagcaaacactttcctgatttatcgaccaagacacatatggtttctaaatctatcaagtggtggggatccatagttatgacgcagtaacatatattattacattcttgactgtcgctaatatctaaatatttattgttatcgtattggattctgcatatagatggcttgtatgtcaaagatatagaacacataaccaatttatagtcgcgctttacattctcgaatctaaagttaagagatttagaaaacattatatcctcggatgatgttatcactgtttctggagtaggatatattaaagtctttacagatttcgtccgattcaaataaatcactaaataatatcccacattatcatctgttagagtagtatcattaaatctattatattttatgaaagatatatcactgctcacctctatatttcgtacatttttaaactgtttgtataatatctctctgatacaatcagatatatctattgtgtcggtagacgataccgttacatttgaattaatggtgttccattttacaacttttaacaagttgaccaattcatttctaatagtatcaaactctccatgattaaatattttaatagtatccattttatatcactacggacacaaagtagctgacataaaccattgtataatttttatgttttatgtttattagcgtacacattttggaagttccggcttccatgtatttcctggagagcaagtagatgatgaggaaccagatagtttatatccgtacttgcacttaaagtctacattgtcgttgtatgagtatgatcttttaaacccgctagacaagtatccgtttgatattgtaggatgtggacatttaacaatctgacacgtgggtggatcggaccattctcctcctgaacacaggacactagagttaccaatcaacgaatatccactattgcaactataagttacaacgctcccatcggtataaaaatcctcgtatccgttatgtcttccgttggatatagatggaggggattggcatttaacagattcacaaataggtgcctcgggattccataccatagatccagtagatcctaattcacaatacgatttagattcaccgatcaactgatatccgctattacaagagtacgttatactagagccaaagtctactccaccaatatcaagttggccattatcgatatctcgaggcgatgggcatctccgtttaatacattgattaaagagtgtccatccagtacctgtacatttagcatatataggtcccattttttgctttctgtatccaggtagacatagatattctatagtgtctcctatgttgtaattagcattagcatcagtctccacactattcttaaatttcatattaatgggtcgtgacggaatagtacagcatgatagaacgcatcctattcccaacaatgtcaggaacgtcacgctctccaccttcatatttatttatccgtaaaaatgttatcctggacatcgtacaaataataaaaagcccatatatgttcgctattgtagaaattgtttttcacagttgctcaaaaacgatggcagtgacttatgagttacgttacactttggagtctcatctttagtaaacatatcataatattcgatattacgagttgacatatcgaacaaattccaagtatttgattttggataatattcgtattttgcatctgctataattaagatataatcaccgcaagaacacacgaacatctttcctacatggttaaagtacatgtacaattctatccatttgtcttccttaactatatatttgtatagataattacgagtctcgtgagtaattccagtaattacatagatgtcgccgtcgtactctacagcataaactatactatgatgtctaggcatgggagacttttttatccaacgatttttagtgaaacattccacatcgtttaatactacatatttctcatacgtggtataaactccacccattacatatatatcatcgtttacgaataccgacgcgcctgaatatctaggagtaattaagtttggaagtcttatccatttcgaagtgccgtgtttcaaatattctgccacacccgttgaaatagaaaattctaatcctcctattacatataactttccatcgttaacacaagtactaacttctgattttaacgacgacatattagtaaccgttttccattttttcgttttaagatctacccgcgatacggaataaacatgtctattgttaatcatgccgccaataatgtatagacaattatgtaaaacatttgcattatagaattgtctatctgtattaccgactatcgtccaatattctgttctaggagagtaatgggttattgtggatatataatcagagtttttaatgactactatattatgttttataccatttcgtgtcactggctttgtagatttggatatagttaatcccaacaatgatatagcattgcgcatagtattagtcataaacttgggatgtaaaatgttgatgatatctacatcgtttggatttttatgtatccactttaataatatcatagctgtaacatcctcatgatttacgttaacgtcttcgtgggataagatagttgtcagttcatcctttgataattttccaaattctggatcggatgtcaccgcagtaatattgttgattatttctgacatcgacgcattatatagttttttaattccatatcttttagaaaagttaaacatccttatacaatttgtgaaattaatattatgaatcatagtttttacacatagatctactacaggcggaacatcaattattatggcagcaactagtatcatttctacattgtttatggtgatgtttatcttcttccagcgcatatagtctaatagcgattcaaacgcgtgatagtttataccattcaatataatcgcttcatcctttagatggtgatcctgaatgcgtttaaaaaaattatacggagacgccgtaataatttccttattcacttgtataatttccccattgatagaaaatattacgctttccattcttaaagtactataagtaattatagtataatgtaaacgtttatatattcaatatttttataaaaatcattttgacattaattcctttttaaatttccgtctatcatctatagaaacgtattctatgaatttataaaatgcttttacgtgtcctatcgtaggcgatagaaccgctaaaaagcctatcgaatttctacaaaagaatctgttatatggtatagggagagtataaaacattaaatgtccgtacttattaaagtattcagtagccaatcctaactctttcgaatacttattaatggctcttgttctgtacgaatctatttttttgaacaacggacctagtggtatatcttgttctatgtatctaaaataatgtctgactagatccgttagtttaatatccgcagtcatcttgtctagaatggcaaatctaactgcgggtttaggctttagtttagtttctatatctacatctatgtctttatctaacaccaaaaatataatagctaatattttattacaatcatccggatattcttctacgatctcactaactaatgtttctttggttatactagtatagtcactatcggacaaataaagaaaatcagatgatcgatgaataatacatttaaattcatcatctgtaagatttttgagatgtctcattagaatattattagggttagtactcattatcattcggcagctattacttattttattatttttcaccatatagatcaatcattagatcatcaaaatatgtttcaatcatcctaaagagtatggtaaatgactcttcccatctaatttctgaacgttcaccaatgtctctagccactttggcactaatagcgatcattcgcttagcgtcttctatattattaactggttgattcaatctatctagcaatggaccgtcggacagcgtcattctcatgttcttaatcaatgtacatacatcgccgtcatctaccaattcatccaacaacataagctttttaaaatcatcattataataggtttgatcgttgtcatttctccaaagaatatatctaataagtagagtcctcatgcttagttaacaactattttttatgttaaatcaattagtacaccgctatgtttaatacttattcatattttagtttttaggattgagaatcaatacaaaaattaatgcatcattaattttagaaatacttagtttccacgtagtcaatgaaacatttgaactcatcgtacaggacgttctcgtacaggacgtaactataaaccggtttatatttgttcaagatagatacaaatccgataactttttttacgaattctacgggatccactttaaaagtgtcataccgggttctttttatttttttaaacagatcaatggtgtgatgttgattaggtcttttacgaatttgatatagaatagcgtttacatatcctccataatggtcaatcgccatttgttcgtatgtcataaattctttaattatatgacactgtgtattatttagttcatccttgttcattgttaggaatctatccaaaatggcaattatactagaactataggtgcgttgtatacacatattgatgtgtctgtttatacaatcaatgctactaccttcgggtaaaattgtagcatcatataccatttctagtactttaggttcattattatccattgcagaggacgtcatgatcgaatcataaaaaaatatattatttttatgttattttgttaaaaataatcatcgaatacttcgtaagatactccttcatgaacataatcagttacaaaacgtttatatgaagtaaagtatctacgatttttacaaaagtccggatgcataagtacaaagtacgcgataaacggaataataatagatttatctagtctatctttttctatagctttcatagttagatacatggtctcagaagtaggattatgtaacatcagcttcgataaaatgactgggttatttagtcttacacattcgctcatacatgtatgaccgttaactacagagtctacactaaaatgattgaacaatagatagtctaccattgtttcgtattcagatagtacagcgtagtacatggcatcttcacaaattatatcattgtctaatagatatttgacgcatcttatggatcccacttcaacagccatcttaaaatcggtagaatcatattgctttcctttatcattaataatttctagaacatcatctctatcataaaagatacaaatattaactgtttgatccgtaataacattgctagtcgatagcaatttgttaataagatgcgctgggctcaatgtcttaataagaagtgtaagaggactatctccgaatttgttttgtttattaacatccgttgatggaagtaaaagatctataatgtctacattcttgactgttttagagcatacaatatggagaggtgtatttccatcatgatctggttttgagggactaattcctagtttcatcatccatgagattgtagaagcttttggattgtctgacataagatgtctatgaatatgatttttgccaaatttatccactatcctggcttcgaatccgatggacattatttttttaaacactctttctgaaggatctgtacacgccaacaacggaccacatccttcttcatcaaccgagttgttaatcttggctccatactgtaccaataaatttattctctctatgacttcatcatctgttcccgagagataatatagaggcgttttatgctgtttatcacacgcgtttggatctgcgccgtgcgtcagcagcatcgcgactattctattattattaattttagaagctatatgcaatggataatttccatcatcatccgtctcatttggagagtatcctctatgaagaagttcttcgacaaatcgttcatctagtcctttaattccacaatacgcatgtagaatgtgataattatttccagaaggttcgatagcttgtagcatattcctaaatacatctaaatttttactattatatttggcataaagagatagataatactcggccgacataatgttgtccattgtagtataaaaattaatatttctatttctgtatatttgcaacaatttactctctataacaaatatcataacttagttcttttatgtcaagaaggcactggtttagttcatctataaatgtcacgccataactaccacgcatgccatactcagaattatgataaagatatttatccttggggtgtaggtaatggggattaatctttgttggatcagtctctaagttaacacatgtcacacatgatccatttatagttatatcacacgatgatgatttatgaattgattccggaagatcgctatcgtattttgtggttccacaattcatttccatacatgttattgtcacactaatattatgatgaactttatctagccgctgagtggtaaacaacagaacagatagtttattatctttaccaacaccctcagccgctgccacaaatctctgatccgtatccatgatggtcatgtttatttctagtccgtatccagtcaacactatgttagcatttctgtcgatatagctttcactcatatgacactcaccaataatagtagaattaatgtcgtaatttacaccaatagtgagttcggcggcaaagtaccaataccggtaatcttgtcgaggaggacatatagtattcttgtattctaccgaatacccgagagatgcgatacaaaagagcaagactaatttgtaaaccatcttactcaaaatatgtaacaatagtacgatgcaatgagtaagacaataggaaatctatcttatatacacataattattctatcaattttaccaattagttagtgtaatgttaacaaaaatgtgggagaatctaattagtttttctttacacaattgacgtacatgagtctgagttccttgtttttgctaattatttcatccaatttattattcttgacgatatcgagatcttttgtataggagtcaaacttgtattcaacatgcttttctataatcattttagctatttcggcatcatccaatagtacattttccagattagcagaatagatattaatgtcgtatttgaacagagcctgtaacatctcaatgtctttattatctatagccaatttaatgtccggaatgaagagaagggaattattggtgtttgtcgacgtcatatagtcgagcaagagaatcatcatatccacgtgtccattttttatagtgatgtgaatacaactaaggagaatagccagatcaaaagtagatggtatctctgaaagaaagtaggaaacaatacttacatcattaagcatgacggcatgataaaatgaagttttccatccagttttcccatagaacatcagtctccaatttttcttaacaaacagttttaccgtttgcatgttaccactatcaaccgcataatacaatgcggtgtttcccttgtcatcaaattgtgaatcatccagtccactgaatagcaaaatctttactattttggtatcttccaatgtggctgcctgatgtaatggaaattcattctctagaagatttttcaatgctccagcgttcaacaacgtacatactagacgcacgttattatcagctattgcataatacaaggcactatgtccatggacatccgccttaaatgtatctttactagagagaaagcttttcagctgcttagacttccaagtattaattcgtgacagatccatgtctgaaacgagacgctaattagtgtatattttttcattttttataattttgtcatattgcaccagaattaataatatctttaatagatctgattagtagatacatggctatcgcaaaacaacatatacacatttaataaaaataatatttattaagaaaattcagatttcacgtacccatcaatataaataaaataatgattccttacaccgtacccatattaaggagattccaccttacccataaacaatataaatccagtaatatcatgtctgatgatgaacacaaatggtgtattaaattccagtttttcaggagatgatctcgccgtagctaccataatagtagatgcctctgctacagttccttgttcgtcgacatctatctttgcattctgaaacattttataaatatataatgggtccctagtcatatgtttaaacgacgcattatctggattaaacatactaggagccatcatttcggctatcgacttaatatccctcttattttcgatagaaaatttagggagtttaagattgtacactttattccctaattgagacgaccaatagtctaattttgcagccgtgatagaatctgtgaaatgggtcatattatcacctattgccaggtacatactaatattagcatccttatacggaaggcgtaccatgtcatattctttgtcatcgattgtgattgtatttccttgcaatttagtaactacgttcatcatgggaaccgttttcgtaccgtacttattagtaaaactagcattgcgtgttttagtgatatcaaacggatattgccatatacctttaaaatatatagtattaatgattgcccatagagtattattgtcgagcatattagaatctactacattagacataccggatctacgttctactatagaattaattttattaaccgcatctcgtctaaagtttaatctatataggccgaatctatgatattgttgataatacgacggtttaatgcacacagtattatctacgaaactttgataagttagatcagtgtacgtatatttagatgttttcagcttagctaatcctgatattaattctgtaaatgctggacccagatctctttttctcaaatccatagtcttcaataattctattctagtattacctgatgcaggcaatagcgacataaacatagaaaacgaataaccaaacggtgagaagacaatattatcatcttgaatatttttatacgctactataccggcattggtaaatccttgtagacgataggcggacgctgaacacgctaacgatagtatcaataacgcaatcatgattttatggtattaataattaaccttatttttatgttcggtataaaaaaattattgatgtctacacatccttttgtaattgacatctatatatccttttgtataatcaactctaatcactttaacttttacagttttccctaccagtttatccctatattcaacatatctatccatatgcatcttaacactctctgccaagatagcttcagagtgaggatagtcaaaaagataaatatatagagcataatcattctcgtatactctgccctttattacatcacccgcattgggcaacgaataacaaaatgcaagcatcttgttaacgggctcgtaaattgggataaaaattatgtttttattgtcttatatctattttattcaagagaatattcaggaatttctttttccggttgtatctcgtcgcagtatatatcatttgtacattgtttcatattttttaatagtttacaccttttagtaggactagtatcgtacaattcatagctgtattttgaattccaatcacgcataaaaatatcttccaattgttgacgaagacctaatccatcatccggtgtaatattaatagatgctccacatgtatccgtaaagtaatttcctgtccaatttgaggtacctatataggccgttttatcggttaccatatatttggcatggtttaccctagaatacggaatgggaggatcagcatctggtacaataaatagctttacttctatatttatgtttttagattttagcatagcgatagatcttaaaaagtttctcatgataaacgaagatcgttgccagcaactaatcaatagcttaacggatacttgtctgtctatagcggatcttcttaattcatcttctatataaggccaaaacaaaattttacccgccttcgaataaataatagggataaagttcataacagatacataaacgaatttactcgcatttctaatacatgacaataaagcggttaaatcattggttctttccatagtacatagttgttgcggtgcagaagcaataaatacagagtgtggaacgccgcttacgttaatactaagaggatgatctgtattataatacgacggataaaagtttttccaattatatggtagattgttaactccaagataccagtatacctcaaaaatttgagtgagatccgctgccaagttcctattattgaagatcgcaatacccaattccttgacctgagttagtgatctccaatccatgttagcgcttcctaaataaatatgtgtattatcagatatccaaaattttgtatgaagaactcctcctaggatatttgtaatatctatgtatcgtacttcaactccggccatttgtagtctttcaacatcctttaatggtttgttagatttattaacggctactctaactcgtactcctcttttgggtaattgtacaatctcgtttaatattatcgtgccgaaattcgtacccacttcatccgataaactccaataaaaagatgatatatctagtgtttttgtggtattggatagaatttccctccacatgttaaatgtagacaaatatactttatcaaattgcatacctataggaatagtttctgtaatcactgcgattgtattatccggattcattttatttgttaaaagaataatcctatatcacttcactctattaaaaatccaagtttctatttctttcatgactgattttttaacttcatccgtttccttatgaagatgatgtttggcaccttcataaatttttatttctctattacaatttgcatgttgcatgaaataatatgcacctaaaacatcgctaatcttattgtttgttccctggagtatgagagtcgggggggtgttaatcttggaaattatttttctaaccttgttggtagccttcaagacctgactagcaaatccagccttaattttttcatgattgactaatgggtcgtattggtatttataaactttatccatatctctagatactgattctggacatagctttccgactggcgcatttggtgtgatggttcccataagtttggcagctagcagattcagtcttgaaacagcatctgcattaactagaggagacattagaatcattgctgtaaacaagtttggattatcgtaagaggctagctcccatggaatgacccaataagtagatttaatagttaccacgtgctgtaccaaagtcatcaatcatcattttttcaccattacttcttccatgtccaatatgatcatgtgagaatactaaaattcctaacgatgatatgttttcagctagttcgtcataacgtccagaatgtttaccagctccatgacttatgaatactaatgccttaggatatgtaataggtttccaatatttacaatatatgtaatcattgtccagattgaacatacagtttgcactcatgattcacgttatataactatcaatattaacagttcgtttgatgatcatattatttttatgttttattgataattgtaaaaacatacaattaaatcaatatagaggaaggagacggctactgtcttttgtaagatagtcatggcgactaaattagattatgaggatgctgttttttactttgtggatgatgataaaatatgtagtcgcgactccatcatcgatctaatagatgaatatattacgtggagaaatcatgttatagtgtttaacaaagatattaccagttgtggaagactgtacaaggaattgatgaagttcgatgatgtcgctatacggtactatggtattgataaaattaatgagattgtcgaagctatgagcgaaggagaccactacatcaattttacaaaagtccatgatcaggaaagtttattcgctaccataggaatatgtgctaaaatcactgaacattggggatacaaaaagatttcagaatctagattccaatcattgggaaacattacagatttgatgaccgacgataatataaacatcttgatactttttctagaaaaaaaattgaattgatgatataggggtcttcataacgcataattattacgttagcattctatatccgtgttaaaaaaaattatcctatcatgtatttgagagttttatatgtagcaaacatgatagctgtgatgccaataagctttagatattcacgcgtgctagtgttagggatggtattatctggtggtgaaatgtccgttatataatctacaaaacaatcatcgcatatagtatgcgatagtagagtaaacatttttatagtttttactggattcatacatcgtctacccaattcggttataaatgaaattgtcgccaatcttacacccaaccccttgttatccattagcatagtattaacttcgttatttatgtcataaactgtaaatgattttgtagatgccatatcatacatgatattcatgtccctattataatcattactaactttatcacaatatatgttgataatatctatatatgatctagtctttgtgggcaactgtctatacaagtcgtctaaacgttgtttactcatatagtatcgaacagccatcattacatggtcccgttccgttgatagataatcgagtatgttagtggacttgtcaaatctatataccatattttctggaagtggatatacatagtcgtgatcaacattattgctagcctcatcttctatatcctgtactataccattatctatatcatctacataatctatgatattattacacataaacatcgacaacatactattgtttattatctaagtcctgttgatccaaacccttgatctcctctatttgtactatctagagattgtacttcttccagttctggataatatatacgttgatagattagctgagctattctatctccagtatttacattaaacgtacattttccattattaataagaatgactcctatgtttcccctataatcttcgtctattacaccacctcctatatcaatgccttttagtgacagaccagacctaggagctattctaccatagcagaacttaggcatggacatactaatatctgtcttaattaactgtctttctcctggagggatagtataatcgtaagcgctatacaaatcatatccggcagcacccggcgattgcctagtaggagatttagctctgttagtttccttaacaaatctaactggtgagttaatattcatgttgaacataaaactaatattttatttcaaaattatttaccatcccatatattccatgaataagtgtgatgattgtacacttctatagtatctatatacgatccacgataaaatcctcctatcaatagcagtttattatccactatgatcaattctggattatccctcggataaataggatcatctatcagagtccatgtattgctggattcacaataaaattccgcatttctaccaaccaagaataaccttctaccgaacactaacgcgcatgatttataatgaggataataagtggatggtccaaactgccactgatcatgattgggtagcaaatattctgtagttgtatcagtttcagaatgtcctcccattacgtatataacattgtttatggatgccactgctggattacatctaggtttcagaagactcggcatattaacccaagcagcatccccgtggaaccaacgctcaacagatgtgggatttggtagacctcctactacgtataatttattgttagcgggtatcccgctagcatacagtctggggctattcatcggaggaattggaatccaattgtttgatatataatttaccgctatagcattgttatgtatttcattgttcatccatccaccgatgagatatactacttctccaacatgagtacttgtacacatatggaatatatctataatttgatccatgttcataggatactctatgaatggatacttgtatgatttgcgtggttgtttatcacaatgaaatattttggtacagtctagtatccattttacattatttatacctctgggagaaagataatttgacctgattacatttttgataaggagtagcagatttcctaatttatttcttcgctttatataccacttaatgacaaaatcaactacataatcctcatctggaacatttagttcatcgctttctagaataagtttcatagatagataatcaaaattgtctatgatgtcatcttccagttccaaaaagtgtttggcaataaagtttttagtatgacataagagattggatagtccgtattctatacccatcatgtaacactcgacacaatattcctttctaaaatctcgtaagataaagtttatacaagtgtagatgataaattctacagaggttaatatagaagcacgtaataaattgacgacgttatgactatctatatatacctttccagtatacgagtaaataactatagaagttaaactgtgaatgtcaaggtctagacaaaccctcgtaactggatctttatttttcgtgtatttttgacgtaaatgtgtgcgaaagtaaggagataactttttcaatatcgtagaattgactattatattgcctcctatggcatcaataattgttttgaatttcttagtcatagacaatgctaatatattcttacagtacacagtattgacaaatatcggcatttatgtttctttaaaagtcaacatctagagaaaaatgattatctttttgagacataactcccattttttggtattcacccacacgtttttcgaaaaaattagtttttccttccaatgatatattttccatgaaatcaaacggattggtaacattataaatttttttaaatcccaattcagaaatcaatctatccgcgacgaattctatatatgttttcatcatttcacaattcattcctataagtttaactggaagagccgcagtaagaaattcttgttcaatggatactgcatctgttataatagatctaacggtttcttcactcggtggatgcaataaatgtttaaacatcaaacatgcgaaatcgcagtgcagaccctcgtctctactaattagttcgttggaaaacgtgagtccgggcattaggccacgctttttaagccaaaatatggaagcgaatgatccggaaaagaagattccttctactgcagcaaaggcaataagtctctctccataaccggcgctgtcatgtatccacttttgagcccaatcggccttcttttttacacaaggcatcgtttctatggcattaaagagatagtttttttcattactatctttaacataagtatcgatcaaaagactatacatttccgaatgaatgttttcaatggccatctgaaatccgtagaaacatctagcctcggtaatctgtacttctgtacaaaatcgttccgccaaattttcattcactattccgtcactggctgcaaaaaacgccaatacatgttttataaaatatttttcgtctggtgttagtttattccaatcattgatatctttagatatatctacttcttccactgtccaaaatgatgcctctgcctttttatacatgttccagatgtcatgatattggattgggaaaataacaaatctatttggatttggtgcaaggatgggttccataactaaattaacaataacaataaattttttttcagttatctatatgcctgtacttggattttttgtacatcgatatcgccgcaatcactacaataattacaagtattattgatagcattgttattagtactatcataattaaattatctacattcatgggtgctgaataatcgttattatcatcattatcattttgtaattgtgacatcatactagataaatcgtttgcgagattgttgtgggaagcgggcatggaggatgcattatcattattatttaacgccttccatttggattcacaaatgttacgcacattcaacattttatggaaactataattttgtgaaaacaaataacaagaaaactcgtcatcgttcaaatttttaacgatagtaaaccgattaaacgtcgagctaatttctaacgctagcgactctgttggatatgggtttccagatatatatcttttcagttcccctacgtatctataatcatctgtaggaaatggaagatatttccatttatctactgttcctaatatcatatgtggtggtgtagtagaaccattaagcgcgaaagatgttatttcgcatcgtattttaacttcgcaataatttctggttagataacgcactctaccagtcaagtcaatgatattagcctttacagatatattcatagtagtcgtaacgatgactccatcttttagatgcgatactcctttgtatgtaccagaatcttcgtacctcaaactcgatatatttaaacaagttaatgagatattaacgcgttttatgaatgatgatatataaccagaagttttatcctcggtggctagcgctataaccttatcattataataccaactagtgtgattaatatgtgacacgtcagtgtgggtacaaatatgtacattatcgtctacgtcgtattcgatacatccgcatacagccaacaaatataaaatgacaaatactctaacgccgttcgtacccatcttgatgcggtttaataaatgttttgatttcaatttattgtaaaaaaagattcggttttatactgttcgatattctcattgcttatattttcatctatcatctccacacagtcaaatccgtggttagcatgcacctcatcaaccggtaaaagactatcggactcttctatcattataactctagaatatttaatttggtcattattaatcaagtcaattatcttatttttaacaaacgtgagtattttactcattttttataaaaacttttagaaatatacagactctatcgtgtgtctatatcttctttttatatccaatgtatttatgtctgatttttcttcatttatcatatataatggtccaaattctacacgtgcttcggattcatccagatcattaaggttcttataattgtaacatccttctcttccctcttctacatcttccttcttattcttattcttagcgtcacagaatctaccacagcaggatcccatgacgagcgtcatattaaactaatccattttcaattataatatatgattagtaatgaccattaaaataaaaaatattcttcataaccggcaagaaagtgaaaagttcacattgaaactatgtcagtagtatacatcatgaaatgatgatatatatatactctattttggtggaggattatatgatataattcgtggataatcatttttaagacacatttctttattcgtaaatcttttcacgttaaatgagtgtccatattttgcaatttcttcatatgatggcggtgtacgtggacgaggctgctcctgttcttgttgtggtcgccgactgtcgtgtctgcgtttagatccctccattatcgcgattgcgtagatggagtactattttataccttgtaattaaatttttttattaattaaacgtataaaaacgttccgtatctgtatttaagagccagatttcgtctaatagaacaaatagctacagtaaaaataactagaataattgctacacccactagaaaccacggatcgtaatacggcaatcggttttcgataataggtggaacgtatattttatttaaggacttaacaattgtctgtaaaccacaatttgcttccgcggatcctgtattaactatctgtaaaagcatatgttgaccgggcggagccgaacattctccgatatctaatttctgtatatctataatattattaacctccgcatacgcattacagttcttttctagcttggataccgcactaggtacatcgtctagatctattcctatttcctcagcgatagctcttctatccttttccggaagcaatgaaatcacttcaataaatgattcaaccatgagtgtgaaactaagtcgagaattactcatgcatttgttagttattcggagcgcgcaatttttaaactgtcctataacctctcctatatgaatagcacaagtgacattagtagggatagaatgttgagctaatttttgtaaataactatctataaaaagattatacaaagttttaaactctttagtttccgccatttatccagtctgagaaaatgtctctcataataaatttttccaagaaactaattgggtgaagaatggaaacctttaatctatatttatcacagtctgttttggtacacatgatgaattcttccaatgccgtactaaattcgatatctttttcgatttctggatatgtttttaataaagtatgaacaaagaaatggaaatcgtaataccagttatgtttaactttgaaattgttttttattttcttgttaatgattccagccacttgggaaaagtcaaagtcgtttaatgccgatttaatacgttcattaaaaacaaactttttatcctttagatgaattattattggttcattggaatcaaaaagtaagatattatcgggtttaagatctgcgtgtaaaaagttgtcgcaacagggtagttcgtagattttaatgtataacagagccatctgtaaaaagataaactttatgtattgtaccaaagatttaaatcctaatttgatagctaactcggtatctactttatctgccgaatacagtgctaggggaaaaattataatgtttcctctttcatattcgtagttagttctcttttcatgttcgaaaaagtgaaacatgcggttaaaatagtttataacattaatattactgttaataactgccggataaaagtgggatagtaatttcacgaatttgatactgtcctttctctcgttaaacgcctttaaaaaaactttagaagaatatctcaatgagagttcctgaccatccatagtttgtatcaataatagcaacatatgaagaacacgtttatacagagtatgtaaaaatgttaatttatagtttaatcccatggcccacgcacacacgattaattttttttcatctccctttagattgttgtatagaaatttgggtactgtgaactccgccgtagtttccatgggactatataattttgtggcctcgaatacaaattttactacatagttatctatcttaaagactataccatatcctcctgtagatatgtgataaaaatcgtcgtttataggataaaatcgtttatccttttgttggaaaaaggatgaattaatgtaatcattctcttctatctttagtagtgtttccttattaaaattcttaaaataatttaacaatctaactgacggagcccaattttggtgtaaatctaattgggacattatattgttaaaatacaaacagtctcctaatataacagtatctgataatctatggggagacatccattgatattcaggggatgaatcattggcaacacccatttattgtacaaaaagccccaatttacaaacgaaagtccaggtttgatagagacaaacaattaactattttgtctctgtttttaacacctccacagtttttaatttctttagtaatgaaattattcacaatatcagtatcttctttatctaccagagattttactaacttgataaccttggctgtctcattcaatagggtagtaatatttgtatgtgtgatattgatatctttttgaattgtttcttttagaagtgattctttgatggtgccagcatacgaattacaataatgcagaaactcggttaacatgcaggaattatagtaagccaattccaattgttgcctgtgttgtattagagtgtcaatatgagcaatggtgtccttgcgtttctctgatagaatgcgagcagcgattttggcgttatcatttgacgatatttctggaatgacgaatcctgtttctactaactttttggtaggacaaagtgaaacaatcaagaagatagcttctcctcctatttgtggaagaaattgaactcctctagatgatctactgacgatagtatctccttgacagatattggaccgaattacagaagtacctggaatgtaaagccctgaaaccccctcattttttaagcagattgttgccgtaaatcctgcactatgcccaagatagagagctcctttggtgaatccatctctatgtttcagtttaaccaagaaacagtcagctggtctaaaatttccatctctatctaatacagcatctaacttgatgtcaggaactatgaccggtttaatgttatatgtaacattgagtaaatccttaagttcataatcatcactgtcatcagttatgtacgatccaaacaatgtttctaccggcatagtggatacgaagatgctatccatcagaatgtttccctgattagtattttctatatagctattcttctttaaacgattttccaaatcagtaactatgttcatttttttaggagtaggacgcctagccagtatggaagaggattttctagatcctctcttcaacatctttgatctcgatggaatgcaaaaccccatagtgaaacaaccaacgataaaaataatattgtttttcactttttataattttaccatctgactcatggattcattaatatctttataagagctactaacgtataattctttataactgaactgagatatatacaccggatctatggtttccataattgagtaaatgaatgctcggcaataactaatggcaaatgtatagaacaacgaaattatactagagttgttaaagttaatattttctatgagctgttccaataaattatttgttgtgactgcgttcaagtcataaatcatcttgatactatccagtaaaccgtttttaagttctggaatattatcatcccattgtaaagcccctaattcgactatcgaatatcctgctctgatagcagtttcaatatcgacggacgtcaatactgtaataaaggtggtagtattgtcatcatcgtgataaactacgggaatatggtcgttagtaggtacggtaactttacacaacgcgatatataactttccttttgtaccatttttaacgtagttgggacgtcctgcagggtattgttttgaagaaatgatatcgagaacagatttgatacgatatttgttggattcctgattattcactataatataatctagacagatagatgattcgataaatagagaaggtatatcgttggtaggataatacatccccattccagtattctcggatactctattgatgacactagttaagaacatgtcttctattctagaaaacgaaaacatcctacatggactcattaaaacttctaacgctcctgattgtgtctcgaatgcctcgtacaaggatttcaaggatgccatagattctttgaccaacgatttagaattgcgtttagcatctgatttttttattaaatcgaatggtcggctctctggtttgctaccccaatgataacaatagtcttgtaaagataaaccgcaagaaaatttatacgcatccatccaaataaccctagcaccatcggatgatattaatgtattattatagattttccatccacaattattgggccagtatactgttagcaacggtatatcgaatagattactcatgtaacctactagaatgatagttcgtgtactagtcataatatctttaatccaatctaaaaaatttaaaattagattttttacactgttaaagttaacaaaagtattacccgggtacgtggatatcatatatggcattggtccattatcagtaatagctccataaactgatacggcgatggtttttatatgtgtttgatctaacgaggaagaaattcgcgcccacaattcatctctagatatgtatttaatatcaaacggtaacacatcaatttcgggacgcgtatatgtttctaaatttttaatccaaatataatgatgacctatatgccctattatcatactgtcaactatagtacacctagggaacttacgatacatctgtttcctataatcgttaaattttacaaatctataacatgctaaaccttttgacgacagccattcattaatttctgatatggaatctgtattctcgataccgtatcgttctaaagccagtgctatatctccctgttcgtgggaacgctttcgtataatatcgatcaacggataatctgaagtttttggagaataatatgactcatgatctatttcgtccataaacaatctagacataggaattggaggcgatgatcttaattttgtgcaatgagtcgtcaatcctataacttctaatcttgtaatattcatcatcgacataatactatctatgttatcatcgtatattagtataccatgaccttcttcatttcgtgccaaaatgatatacagtcttaaatagttacgcaatatctcaatagtttcataattgttagctgttttcatcaaggtttgtatcctgtttaacatgatggcgttctataacgtctctattttctatttttaattttttaaatttttaacgatttactgtggctagatacccaatctctctcaaatatttttttagcctcgcttacaagctgtttatctatactattaaaactgacgaatccgtgattttggtaatgggttccgtcgaaatttgccgaagtgatatgaacatattcgtcgtcgactatcaacaattttgtattattctgaatagtgaaaaccttcacagatagatcattttgaacacacaacgcatctagacttttggcggttgccatagaatatacgtcgttcttatcccaattaccaactagaagtctgatcttaactcctctattaatggctgcttctataatggagttgtaaatgtcgggccaatagtagctattaccgtcgacacgtgtagtgggaactatggccaaatgttcaatatctatactagtcttagctgacctgagtttatcaataactacatcggtatctagatctctagaatatcccaataggtgttccggagaatcagtaaagaacactccacctataggattcttaatatgatacgcagtgctaactggcaaacaacaagccgcagagcataaattcaaccatgaattttttgcgctattaaaggctttaaaagtatcaaatcttctacgaagatctgtggccagcgggggataatcagaatatacacctaacgttttaatcgtatgtatagatcctccagtaaatgacgcgtttcctacataacatctttcatcatctgacacccaaaaacaaccgagtagtagtcccacattattttttttatctatattaacggttataaaatttatatccgggcagtgactttgtagctctcccagatttcttttccctcgttcatctagcaaaactattattttaatccctttttcagatgcctcttttagtttatcaaaaataagcgctcccctagtcgtactcagaggattacaacaaaaagatgctatgtatatatatttcttagctagagtgataatttcgttaaaacattcaaatgttgttaaatgatcggatctaaaatccatattttctggtagtgtttctaccagcctacattttgctcccgcaggtaccgatgcaaatggccacatttagttaacataaaaacttatacatcctgttctatcaacgattctagaatatcatcggctatatcgctaaaattttcatcaaagtcgacatcacaacctaactcagtcaatatattaagaagttccatgatgtcatcttcgtctatttctatatccgtatccattgtagattgttgaccgattatcgagtttaaatcattactaatactcaatccttcagaatacaatctgtgtttcattgtaaatttataggcggtgtatttaagttggtagattttcaattatgtattaatatagcaacagtagttcttgctcctccttgattctagcatcctcttcattattttcttctacgtacataaacatgtccaatacgttagacaacacaccgacgatggcggccgctacagacacgaatatgactaaaccgatgaccatttaaaaacccctctctagctttcacttaaactgtatcgatcattcttttagcacatgtataatataaaaacattattctatttcgaatttaggcttccaaaaatttttcatccgtaaaccgataataatatatatagacttgttaatagtcggaataaatagattaatgcttaaactatcatcatctccacgattagagatacaatatttacattctttttgctgtttcgaaactttatcaatacacgttaatacaaacccaggaaggagatattgaaactgaggctgttgaaaatgaaacggtgaatacaataattcagataatgtaaaatcatgattccgtattctgatgatattagaactgctaatggatgtcgatggtatgtatctaggagtatctattttaacaaagcatcgatttgctaatatacaattatccttttgattaattgttattttattcatattcttaaaaggtttcatatttatcaattcttctacattaaaaatttccatttttaatttatgtagccccgcaatactcctcattacgtttcattttttgtctataatatccattttgttcatctcggtacatagattatccaattgagaagcgcatttagtagttttgtacattttaagtttattgacgaatcgtcgaaaactagttatagttaacattttattatttgataccctgatattaatacccctgccgttactattatttataactgatgtaatccacgtaacattggaattaactatcgatagtaatgcatcgacgcttccaaaattgtctattataaactcaccgataatttttttattgcatgttttcatattcattaggattatcaaatctttaatcttattacgattgtatgcgttgatattacaagacgtcattctaaaagacggaggatctccatcaaatgccagacaatcacgtacaaagtacatggaaataggttttgttctattgcgcatcatagatttatatagaacacccgtagaaatactaatttgttttactctataaaatactaatgcatctatttcatcgttttgtataacgtctttccaagtgtcaaattccaaatttttttcattgatagtaccaaattcttctatctctttaactacttgcatagataggtaattacagtgatgcctacatgccgttttttgaaactgaatagatgcgtctagaagcgatgctacgctagtcacaatcaccactttcatatttagaatatatatatgtaaaaatatagtagaatttcattttgtttttttctatgctataaatgaattctcattttgcatctgctcatactccgttttatattaataccaaagaaggaagatatctggttctaaaagccgttaaagtatgcgatgttagaactgtagaatgcgaaggaagtaaagcttcctgcgtactcaaagtagataaaccctcatcgcccgcgtgtgagagaagaccttcgtccccgtccagatgcgagagaatgaataaccctggaaaacaagttccgtttatgaggacggacatgctacaaaatatgttcgcggctaatcgcgataatgtagcttctagacttttgtcctaaaatactattatatccttttcgatattaataaatccgtgtcgtccaggttttttatctctttcagtatgtgaatagataggtattttatctctattcatcatcgaatttaagagatccgataaacattgtttgtattctccagatgtcagcatctgatacaacaatatatgtgcacataaacctctggcacttatttcatgtaccttccccttatcactaaggagaatagtatttgagaaatatgtatacatgatattatcatgaattagatatacagaatttgtaacactctcgaaatcacacgatgtgtcggcgttaagatctaatatatcactcgataacacattttcatctagatacactagacattttttaaagctaaaatagtctttagtagtaacagtaactatgcgattattttcatcgatgatacatttcatcggcatattattacgcttaccatcaaagactataccatgtgtatatctaacgtattctagcatggttgccatacgcgcattaaacttttcaggatctttggatagatcttccaatctatctatttgagaaaacatttttatcatgttcaatagttgaaacgtcggatccactatatagatattatctataaagattttaggaactacgttcatggtatcctggcgaatattaaaactatcaatgatatgattatcgttttcatcttttatcaccatatagtttctaagatatgggattttacttaatataatattatttcccgtgataaattttattagaaaggccaaatctataagaaaagtcctagaattagtctgaagaatatctatatcgccgtatagtatatttggattaattagatatagagaatatgatccgtaacatatacaacttttattatggcgtctaagatattcttccatcaacttattaacatttttgactagggaagatacattatgacgtcccattacttttgccttgtctattactgcgacgttcatagaatttagcatatctcttgccaattcttccattgatgttacattataagaaattttagatgaaattacatttggagctttaatagtaagaactcctaatatgtccgtgtatgtggtcactaatacagattgtagttctataatcgtaaataatttacctatattatatgtttgagtctgtttagaaaagtagctaagtatacgatcttttatttctgatgcagatgtattaacatcggaaaaaaatctttttttattcttttttactaaagatacaaatatgtctttgttaaaaacagttattttctgaatatttctagcttgtaattttaacatatgatattcgttcacactaggtactctgcctaaataggtttctataatctttaatgtaatattaggaaaagtattctgatcaggattcctattcattttgaggatttaaaactctgattattgtctaatatggtctctacgcaaactttttcacagagcgatagagtttttgataactcgtttttcttaagaaatataaaactactgtctccagagctcgctctatcttttattttatctaattcgatacaaactcctgatactggttcagaaagtaattcattaattttcagtcctttatagaagatatttaatatagataatacaaaatcttcagtttttgatatcgatctgattgatcctagaactagatatattaataacgtgctcattaggcagtttatggcagcttgataattagatatagtatattccagttcatatttattagataccgcattgcccagattttgatattctatgaattcctctgaaaataaatccaaaataactagacattctattttttgtggattagtgtactctcttccctctatcatgttcactactggtgtccacgatgataaatatctagagggaatataatatagtccataggatgccaatctagcaatgtcgaataactgtaattttattcttcgctcttcattatgaattgattcttgaggtataaacctaacacaaattatattattagacttttcgtatgtaatgtctttcatgttataagtttttaatcctggaatagaatctattttaatgaggcttttaaacgcagagttctccaacgagtcaaagcataatactctgttgtttttcttatatacgatgttacgattttcttctttgaatggaataggtttttgaattagtttataattacaacataatagataaggaagtgtgcaaatagtacgcggaaaaaacataatagctcccctgttttcatccatggttttaagtaaatgatcactggcttctttagtcaatggatattcgaacattaaccgtttcatcatcattggacagaatccatatttcttaatgtaaagagtgatcaaatcattgtgtttattgtaccatcttgttgtaaatgtgtattcggttatcggatctgctcctttttctattaaagtatcgatgtcaatctcgtctaagaattcaactatatcgacatatttcatttgtatacacataaccattactaacgtagaatgtataggaagagatgtaacgggaacagggtttgttgattcgcaaactattctaatacataattcttctgttaatacgtcttgcacgtaatctattatagatgccaagatatctatataattattttgtaagatgatgttaactatgtgatctatataagtagtgtaataattcatgtattttgatatatgttccaactctgtctttgtgatgtctagtttcgtaatatctatagcatcctcaaaaaatatattcgcatatattcccaagtcttcagttctatcttctaaaaaatcttcaacgtatggaatataataatctattttacctcttctgatatcattaatgatatagtttttgacactatcttctgtcaattgattcttattcactatatctaagaaacggatagcgtccctaggacgaactactgccattaatatctctattatagcttctggacataattcatctattataccagaattaatgggaactattccgtatctatctaacatagttttaagaaagtcagaatctaagacttgatgttcatatattggttcatacatgaaatgatctctattgatgatagtgactatttcattctctgaaaattggtaactcattctatatatgctttccttgttgatgaaggatagaatatactcaatagaatttgtaccaacaaactgttctcttatgaatcgtatatcatcatctgaaataatcatgtaaggcatacatttaacaattagagacttgtctcctgttatcaatatactattcttgtgataatttatgtgtgaggcaaatttgtccacgttctttaattttgttatagtagatatcaaatccaatggagctacagttcttggcttaaacagatatagtttttctggaacaaattctacaacattattataaaggactttgggtaaataagtgggatgaaatcctattttaattaatgcgatagccttgtcctcgtgcagatatccaaacgcttttgtgatagtatggcattcattgtctagaaacgctctacgaatatctgtgacagatatcatctttagagaatatactagtcgcgttaatagtactacaatttgtattttttaatctatctcaataaaaaaattaatatgtatgattcaatgtataactaaactactaactgttattgataactagaatcagaatctaatgatgacgtacccaagaagtttatctactgccaatttagctgcattatttttagcatctcgtttagattttccatctgccttatcgaatactcttccgtcgatatctacacaggcataaaatgtaggagagttactaggcccaactgattcaatacgaaaagaccaatctctcttagttatttggcagtactcattaataacggtgacagggttagcatctttccaatcaataatttttttagccggaataacatcatcaaaagacttatgatcctctctcattgatttttcgcgggatacatcatctattatgacgtcagccataacatcagcatccggcttatccgcctccgttgtcataaaccaacgaggaggaatatcgtcggagctgtacaccatagcactacgttgaagatcgtacagagctttattaacttctcgcttctccatattaagttgtctagttagttgtgcagcagtagctccttcgattccaatggttttaatagcctcacacacaatctctgcgttagaacgttcgtcgatatagattttagacatttttagagagaactaacacaaccagcaataaaactgaacctactttatcatttttttattcatcatcctctggtggttcgtcgttcctatcaaatgtagctctgattaacccgtcatctataggtgatgctggttctggagattctggaggagatggattattatctggaagaatctctgttatttccttgttttcatgtatcgattgcgttgtaacattaagattgcgaaatgctctaaatttgggaggcttaaagtgttgtttgcaatctctacacgcgtgtctaactagtggaggttcgtcagctgctctagtttgaatcatcatcggcgtagtattcctacttttacagttaggacacggtgtattgtatttctcgtcgagaacgttaaaataatcgttgtaactcacatcctttattttatctatattgtattctactcctttcttaatgcattttataccgaataagagatagcgaaggaattctttttcggtgccgctagtacccttaatcatatcacatagtgttttatattccaaatttgtggcaatagacggtttatttctatacgatagtttgtttctggaatcctttgagtattctataccaatattattctttgattcgaatttagtttcttcgatattagattttgtattacctatattcttgatgtagtactttgatgatttttccatggcccattctattaagtcttccaagttggcatcatccacatattgtgatagtaattctcggatatcagtagcggctaccgccattgatgtttgttcattggatgagtaactactaatgtatacattttccatttataacacttatgtattaactttgttcatttatattttttcattattatgttgatattaacaaaagtgaatatatatatatgttaataattgtattgtggttatacggctacaattttataatgagtgaaagtcagtgtccgatgatcaatgacgatagctttactctgaaaagaaagtatcaaatcgatagtgcggagtcaacaataaaaatggataagaagaggataaagtttcagaatagagccaaaatggtaaaagaaataaatcagacaataagagcagcacaaactcattacgagacattgaaactaggatacataaaatttaagagaatgattaggactactactctagaagatatagcaccatctattccaaataatcagaaaacttataaactattctcggacatttcagccatcggcaaagcatcacagaatccgagtaagatggtatatgctctgctgctttacatgtttcccaatttgtttggagatgatcatagattcattcgttatagaatgcatccaatgagtaaaatcaaacacaagatcttctctcctttcaaacttaatcttattagaatattagtggaagaaagattctataataatgaatgcagatctaataaatggaaaataattggaacacaagttgataaaatgttgatagctgaatctgataaatatacaatagatgcaaggtataacctaaaacccatgtatagaatcaagggagaatctgaagaagataccctcttcatcaaacagatggtagaacaatgtgtgacatcccaggaattggtggaaaaagtgttgaagatactgtttagagatttgttcaagagtggagaatacaaagcgtacagatacgatgatgatgtagaaaatggatttattggattggatacactaaaattaaacattgttcatgatatagttgaaccatgtatgcctgttcgtaggccagtggctaagatactgtgtaaagaaatggtaaataaatactttgagaatccgctacatattattggtaagaatcttcaagagtgcattgactttgttagtgaataggcatttcatctttctccaatactaattcaaattgttaaattaataatggatagtataaatagtaaaaataattattagaataagagtgtagtatcatagataactctcttctataaaaatggattttattcgtagaaagtatcttatatacacagtagaaaataatatagattttttaaaggatgatacattaagtaaagtaaacaattttaccctcaatcatgtactagctctcaagtatctagttagcaattttcctcaacacgttattactaaggatgtattagctaataccaatttttttgttttcatacatatggtacgatgttgtaaagtgtacgaagcggttttacgacacgcatttgatgcacccacgttgtacgttaaagcattgactaagaattatttatcgtttagtaacgcaatacaatcgtacaaggaaaccgtgcataaactaacacaagatgaaaaatttttagaggttgccgaatacatggacgaattaggagaacttataggcgtaaattatgacttagttcttaatccattatttcacggaggggaacccatcaaagatatggaaatcatttttttaaaactgtttaagaaaacagacttcaaagttgttaaaaaattaagtgttataagattacttatttgggcatacctaagcaagaaagatacaggcatagagtttgcggataatgatagacaagatatatatactctatttcaacaaactggtagaatcgtccatagcaatctaacagaaacgtttagagattatatctttcccggagataagactagctattgggtgtggttaaacgaaagtatagctaatgatgcggatatcgttcttaatagacccgccattaccatgtatgataaaattcttagttatatatactctgagataaaacaaggacgcgttaataaaaacatgcttaagttagtttatatctttgagcctgaaaaagatatcagagaacttctgctagaaatcatatatgatattcctggagatatcctatctattattgatgcaaaaaacgacgattggaaaaaatattttattagtttttataaagctaattttattaacggtaatacatttattagtgatagaacgtttaacgaggacttattcagagttgttgttcaaatagatcccgaatatttcgataatgaacgaattatgtctttattctctacgagtgctgcggacattaaacgatttgatgagttagatattaataacagttatatatctaatataatttatgaggtgaacgatatcacattagatacaatggatgatatgaagaagtgtcaaatctttaacgaggatacgtcgtattatgttaaggaatacaatacatacctgtttttgcacgagtcggatcccatggtcatagagaacggaatactaaagaaactgtcatctataaaatccaagagtagacggctgaacttgtttagcaaaaacattttaaaatattatttagacggacaattggctcgtctaggtcttgtgttagatgattataaaggagacttgttagttaaaatgataaaccatcttaagtctgtggaggatgtatccgcattcgttcgattttctacagataaaaaccctagtattcttccatcgctaatcaaaactattttagctagttataatatttccatcatcgtcttatttcaaaggtttttgagagataatctatatcatgtagaagaattcttggataaaagcatccatctaaccaagacggataagaaatatatacttcaattgataagacacggtagatcatagaacagaccaaatatattattaataatttgtatatacatagatataattatcacacatttttgataaatgggaactgctgcaacaattcagactcccaccaaattaatgaataaagaaaatgcagaaatgattttggaaaaaattgttgatcatatagttatgtatattagtgacgaatcaagtgattcagaaaataatcctgaatatattgattttcgtaacagatacgaagactatagatctctcattataaaaagtgatcacgagtttgtaaagctatgtaaaaatcatgcggagaaaagttctccagaaacgcaacaaatgattatcaaacacatatacgaacaatatcttattccagtatctgaagtactattaaaacctataatgtccatgggtgacataattacatataacggatgtaaagacaatgaatggatgctagaacaactctctaccctaaactttaacaatctccgcacatggaactcatgtagcataggcaatgtaacgcgtctgttttatacattttttagttatctgatgaaagataaactaaatatataagtataatcccattctaatactttaacctgatgtattagcatcttattagaatattaacctaactaaaagacataacataaaaactcattacatagttgataaaaagcggtaggatataaatattatggctgccaccgttccgcgttttgacgacgtgtacaaaaatgcacaaagaagaattctagatcaagaaacattttttagtagaggtctaagtagaccgttaatgaaaaacacatatctatttgataattacgcgtatggatggataccagaaactgcaatttggagtagtagatacgcaaacttagatgcaagtgactattatcccatttcgttgggattacttaaaaagttcgagtttctcatgtctctatataaaggtcctattccagtatacgaagaaaaagtaaatactgaattcattgctaatggatctttctccggtagatacgtatcatatcttagaaagttttctgctcttccaacaaacgagtttattagttttttgttactgacttccattccaatctataatatcttgttctggtttaaaaatactcagtttgatattactaaacacacattattcagatacgtctatacagataatgccaaacacctggcgttggctaggtatatgtatcaaacaggagactataagcctttgtttagtcgtctcaaagagaattatatatttaccggtcccgttccaatatgtatcaaagatatagatcaccctaatcttagtagagcaagaagtccatccgattatgagacattagctaatattagtactatattgtactttaccaagtatgatccggtattaatgtttttattgttttacgtacctgggtattcaattactacaaaaattactccagccgtagaatatctaatggataaactgaatctaacaaagagcgacgtacaactgttgtaaattattttatgcttcgtaaaatgtaggttttgaaccaaacattctttcaaagaatgagatgcataaaactttattatccaatagattgactatttcggacgtcaatcgtttaaagtaaacttcgtaaaatattctttgatcactgccgagtttaaaacttctatcgataattgtttcatatgttttaatatttacaagttttttggtccatggtccattaggacaaatatatgcaaaataatatcgttctccaagttctatagtctctggattatttttattatattcagtaaccaaatacatattagggttatctgcggatttataatttgagtgatgcattcgactcaacataaataattctagaggagacgatctactatcaaattcggatcgtaaatctgtttctaaagaacggagaatatctatacatacctgattagaattcatccgtccttcagacaacatctcagacagtctggttttgtacatcttaatcatattcttatgaaacttggaaacatctcttctagtttcactagtacctttattaattctctcaggtacagattttgaattcgacgatgctgagtatttcatcgttgtatatttcttcttcgattgcataatcagattcttatataccgcctcaaactctattttaaaattattaaacaatactctattattaatcagtcgttctaactctttcgctatttctatagacttatctacatcttgactgtctatctctgtaaacacggagtcggtatctccatacacgctacgaaaacgaaatctgtaatctataggcaacgatgttttcacaatcggattaatatctctatcgtccatataaaatggattacttaatggattggcaaaccgtaacataccgttagataactctgctccatttagtaccgattctagatacaagatcattctacgtcctatggatgtgcaactcttagccgaagcgtatgagtatagagcactatttctaaatcccatcagaccatatactgagttggctactatcttgtacgtatattgcatggaatcatagatggccttttcagttgaactggtagcctgttttagcatctttttatatctggctctctctgccaaaaatgttcttaatagtctaggaatggttccttctatcgatctatcgaaaattgctatttcagagatgaggttcggtagtctaggttcacaatgaaccgtaatatatctaggaggtggatatttctgaagcaatagctgattatttatttcttcttccaatctattggtactaacaacgacaccgactaatgtttccggagatagatttccaaagatacacacattaggatacagactgttataatcaaagattaatacattattactaaacattttttgttttggagcaaataccttaccgccttcataaggaaacttttgttttgtttctgatctaactaagatagttttagtttccaacaatagctttaacagtggacccttgatgactgtactcgctctatattcgaataccatggattgaggaagcacatatgttgacgcacccgcgtctgtttttgtttctactccataatactcccacaaatactgacacaaacaagcatcatgaatacagtatctagccatatctaaagctatgtttagattataatccttatacatctgagctaaatcaacgtcatcctttccgaaagataatttatatgtatcattaggtaaagtaggacataatagtacgactttaaatccattttcccaaatatctttacgaattactttacatataatatcctcatcaacagtcacataattacctgtggttaaaacctttgcaaatgcagcggctttgcctttcgcgtctgtagtatcgtcaccgatgaacgtcatttctctaactcctctatttaatactttacccatgcaactgaacgcgttcttggatatagaatccaatttgtacgaatccaatttttcaaatttttgaatgaatgaatatagatcgaaaaatatagttccattattgttattaacgtgaaacgtagtattggccatgccgcctactcccttatgactagactgatttctctcataaatacagagatgtacagcttcctttttgtccggagatctaaagataattttctctcctgttaataactctagacgattagtaatatatctcagatcaaagttatgtccgttaaaggtaacgacgtagtcgaacgttagttccaacaattgtttagctattcgtaacaaaactatttcagaacatagaactagttctcgttcgtaatccatttccattagtgactgtatcctcaaacatcctctatcgacggcttcttgtatttcctgttccgttaacatctcttcattaatgagcgtaaacaataatcgtttaccacttaaatcgatataacagtaacttgtatgcgagattgggttaataaatacagaaggaaacttcttatcgaagtgacactctatatctagaaataagtacgatcttgggatatcgaatctaggtatttttttagcgaaacagttacgtggatcgtcacaatgataacatccattgttaatctttgtcaaatattgctcgtccaacgagtaacatccgtctggagatatcccgttagaaatataaaaccaactaatattgagaaattcatccatggtggcattttgtatgctgcgtttctttggctcttctatcaaccacatatctgcgacggagcattttctatctttaatatctagattataacttattgtctcgtcaatgtctatagttctcatctttcccaacggcctcgcattaaatggaggaggagacaatgactgatatatttcgtccgtcactacgtaataaaagtaatgaggaaatcgtataaatacggtctcaccatttcgacatctggatttcagatataaaaatctgttttcaccgtgactttcaaaccaattaatgcaccgaacatccatttatagaatttagaaatatattttcatttaaatgaatcccaaacattggggaagagccgtatggaccattatttttatagtactttcgcaagcgggtttagacggcaacatagaagcgtgtaaacgaaaactatatactatagttagcactcttccatgtcctgcatgtagacggcacgcgactatcgctatagaggacaataatgtcatgtctagcgatgatctgaattatatttattattttttcatcagattatttaacaatttggcatctgatcccaaatacgcgatcgatgtgacaaaggttaaccctttataaacttaacccattataaaacttatgattagtcacaactgaaataaccgcgtgattattttttggtataattctacacggcatggtttctgtgactatgaattcaacccccgttacattagtgaaatctttaacaaacagcaagggttcgtcaaagacataaaactcattgtttacaatcgaaatagaccccctatcacacttaaaataaaaaatatccttatcctttaccaccaaataaaattctgattggtcaatgtgaatgtattcacttaacagttccacaaatttatttattaactccgaggcacatacatcgtcggtattttttatggcaaactttactcttccagcatccgtttctaaaaaaatattaacgagttccatttatatcatccaatattattgaaatgacgttgatggacagatgatacaaataagaaggtacggtacctttgtccaccatctcctccaattcatgctctattttgtcattaactttaatgtatgaaaacagtacgccacatgcttccatgacagtgtgtaacactttggatacaaaatgtttgacattagtataattgttcaagactgtcaatctataatagatagtagctataatatattctatgatggtattgaagaagatgacaaccttggcatattgatcatttaacacagacatggtatcaacagatagcttgaatgaaagagaatcagtaattggaataagcgtcttctcgatagagtgtccgtataccaacatgtctgatattttgatgtattccattaaattatttagttttttctttttattctcgttaaacagcatttctgtcaacggaccccaacatcgttgaccgattaagttttgattgatttttccgtgtaaggcgtatctagtcagatcgtatagcctatccaataatccatcatctgtgcgtagatcacatcgtacactttttaattctctatagaagagcgacagacatctggagcaattacagacagcaatttctttattctctacagatgtaagatacttgaagacattcctatgatgatgcagaattttggataacacggtattgatggtatctgttaccataattcctttgatggctgatagtgtcagagcacaagatttccaatctttgacaatttttagcaccattatctttgttttgatatctatatcagacagcatggtgcgtctgacaacacagggattaagacggaaagatgaaatgattctctcaacatcttcaatagataccttgctattttttctggcattatctatatgtgcgagaatatcctctagagaatcagtatcctttttgatgatagtggatctcaatgacatgggacgtttaaaccttcttattctatcaccagattgcatggtgatttgtcttctttcttttatcataatgtaatctctaaattcatcggcaaattgtctatatctaaaatcataatatgagatgtttacctctacaaatatctgttcgtccaatgttagagtatttacatcagttttgtattccaaattaaacatggcaacggatttaattttatattcctctattaagtcctcgtcgataataacagaatgtagataatcatttaatccatcgtacatggttggaagatgcttgttgacaaaatctttaattgtcttgatgaaggtgggactatatctaacatcttgattaataaaatttataacattgtccataggatactttgtaactagttttatacacatctcttcatcggtaagtttagacagaatatcgtgaacaggtggtatattatattcatcagatatacgaagaacaatgtccaaatctatattgtttaatatattatatagatgtagcgtagctcctacaggaatatctttaactaagtcaatgatttcatcaaccgttagatctattttaaagttaatcatataggcattgatttttaaaaggtatgtagccttgactacattctcattaattaaccattccaagtcactgtgtgtaagaagattatattctatcataagcttgactacatttggtcccgataccattaaagaattcttatgatataaggaaacagcttttaggtactcatctactctacaagaattttggagagccttaacgatatcagtgacgtttattatttcaggaggaaaaaacctaacattgagaatatcggaattaatagcttccagatacagtgattttggcaatagtccgtgtaatccataatccagtaacacgagctggtgcttgctagacaccttttcaatgtttaatttttttgaaataagctttgataaagccttcctcgcaaattccggatacatgaacatgtcggcgacatgattaagtattgttttttcattattttctcaataccccaatagatgatagaatatcacccaatgcgtccatgttgtctatttccaacaggtcgctatatccaccaatagaagtttttccaaaaaagattctaggaacagttctaccaccagtaatttgttcaaaatagtcacgcaattcattttcgggtttaaattctttaatatcgacaatttcatacgctcctcttttgaaactaaacttatttagaatatccagtgcatttctacaaaaaggacatgtatacttgacaaaaattgtcactttgttattggccaacctttgttgtacaaattcctcggccattttaatatttaagtgatataaaactatctcgacttatttaactctttagtcgagatatatggacgcagatagctatatgatagccaactacagaaggcaaacgctataaaaaacataattacgacgagcatatttataaatatttttattcagcattacttgatatagtaatattaggcacagtcaaacattcaaccactctcgatacattaactctctcattttctttaacaaattctgcaatatcttcgtaaaaagattcttgaaactttttagaatatctatcgactctagatgaaatagcgttcgtcaacatactatgttttgtatacataaaggcgcccattttaacagtttctagtgacaaaatgctagcgatcctaggatcctttagaatcacatagattgacgattcgtctctcttagtaactctagtaaaataatcatacaatctagtacgcgaaataatattatccttgacttgaggagatctaaacaatctagttttgagaacatcgataagttcatcgggaatgacatacatactatctttaatagaactcttttcatccagttgaatggattcgtccttaaccaactgattaatgagatcttctattttatcattttccagatgatatgtatgtccattaaagttaaattgtgtagcgcttctttttagtctagcagccaatactttaacatcactaatatcgatatacaaaggagatgatttatctatggtattaagaattcgtttttcgacatccgtcaaaaccaattcctttttgcctgtatcatccagttttccatcctttgtaaagaaattattttctactagactattaataagactgataaggattcctccataattgcacaatccaaactttttcacaaaactagactttacaagatctacaggaatgcgtacttcaggttttttagcttgtgattttttcttttgcggacattttcttgtgaccaactcatctaccatttcattgattttagcagtgaaataagctttcaatgcacgggcactgatactattgaaaacgagttgatcttcaaattccgccatttaagttcaccaaacaacttttaaatacaaatatatcaatagtagtagaataagaactataaaaaaaataataattaaccaataccaaccccaacaaccggtattattagttgatgtgactgttttctcatcacttagaacagatttaacaatttctataaagtctgtcaaatcatcttccggagaccccataaatacaccaaatatagcggcgtacaacttatccatttatacattgaatattggcttttctttatcgctatcttcatcatattcatcatcaatatcaacaagtcccagattacgagccagatcttcttctacattttcagtcattgatacacgttcactatctccagagagtccgataacgttagccaccacttctctatcaatgattagtttcttgagcgcgaaagtaatttttgtttccgttccggatctatagaagacgataggtgtgataattgccttggccaattgtctttctcttttactgagtgattctagttcaccttctatagatctgagaatggatgattctccagtcgaaacatattctaccatggatccgtttaatttgttgatgaagatggattcatccttaaatgttttctctgtaatagtttccaccgaaagactatgcaaagaatttggaatgcgttccttgtgcttaatgtttccatagacggcttctagaagttgatacaacataggactagccgcggtaacttttatttttagaaagtatccatcgcttctatcttgtttagatttatttttataaagtttagtctctccttccaacataataaaagtggaagtcatttgactagataaactatcagtaagttttatagagatagacgaacaattagcgtattgagaagcatttagtgtaacgtattcgatacattttgcattagatttactaatcgattttgcatactctataacacccgcacaagtctgtagagaatcgctagatgcagtaggtcttggtgaagtttcaactctcttcttgattaccttactcatgattaaacctaaataattgtactttgtaatataatgatatatattttcactttatctcatttgagaataaaaatgtttttgtttaaccactgcatgatgtacagatttcggaatcgcaaaccaccagtggttttattttatccttgtccaatgtgaattgaatgggagcggatgcgggtttcgtacgtagatagtacattcccgtttttagaccgagactccatccgtaaaaatgcatactcgttagtttggaataactcggatctgctatatggatattcatagattgactttgatcgatgaaggctcccctgtctgcagccatttttatgatcgtcttttgtggaatttcccaaatagttttataaactcgcttaatatcttctggaaggtttgtattctgaatggatccaccatctgccataatcctattcttgatctcatcattccataattttctctcggttaaaactctaaggagatgcggattaactacttgaaattctccagacaatactctccgagtgtaaatattactggtatacggttccaccgactcattatttcccaaaatttgagcagttgatgcagtcggcataggtgccaccaataaactatttctaagaccgtatgttctgattttatcttttagaggttcccaattccaaagatccgacggtacaacattccaaagatcatattgtagaataccgttactggcgtacgatcctacatatgtatcgtatggtccttccttctcagctagttcacaactcgcctctaatgcaccgtaataaatggtttcgaagatcttcttatttagatcttgtgcttccaggctatcaaatggataatttaagagaataaacgcgtccgctaatccttgaacaccaataccgataggtctatgtctcttattagagatttcagcttctggaataggataataattaatatctataattttattgagatttctgacaattactttgaccacatccttcagtttgagaaaatcaaatcgcccatctattacaaacatgttcaaggcaacagatgccagattacaaacggctacctcattagcatccgcatattgtattatctcagtgcaaagattactacacttgatagttcctaaattttgttgattactctttttgttacacgcatccttataaagaatgaatggagtaccagtttcaatctgagattctataatcgctttccagacgactcgagcctttattatagatttgtatctcctttctctttcgtatagtgtatacaatcgttcgaactcgtctccccaaacattgtccaatccaggacattcatccggacacatcaacgaccactctccgtcatccttcactcgtttcataaagagatcaggaatccaaagagctataaatagatctctggttctatgttcctcgtttcctgtattctttttaagatcgaggaacgccataatatcagaatgccacggttccaagtatatggccataactccaggccgtttgtttcctccctgatctatgtatctagcggtgttattataaactctcaacattggaataataccgtttgatataccattggtaccggagatatagcttccactggcacgaatattactaattgatagacctattccccctgccattttagagattaatgcgcatcgttttaacgtgtcatagataccctctatgctatcatcgatcatgttaagtagaaaacagctagacatttggtgacgactagttcccgcattaaataaggtaggagaagcgtgcgtaaaccatttttcagaaagtagattgtacgtctcaatagctgagtctatatcccattgatgaattcctactgcgacacgcattaacatgtgctgaggtctttcaacgatcttgttgtttattttcaacaagtaggatttttccaaagttttaaaaccaaaatagttgtatgaaaagtctcgttcgtaaataataaccgagttgagtttatccttatatttgttaactatatccatggtgatacttgaaataatcggagaatgtttcccatttttaggattaacatagttgaataaatcctccatcacttcactaaatagtttttttgtttccttgtgtagatttgatacggctattctggcggctagaatggcataatccggatgttgtgtagtacaagtggctgctatttcggctgccagagtgtccaattctaccgttgttactccattatatattccttgaataaccttcatagctattttaataggatctatatgatccgtgtttaagccataacataattttctaatacgagacgtgattttatcaaacatgacattttccttgtatccatttcgtttaatgacaaacatttttgttggtgtaataaaaaaattatttaacttttcattaatagggatttgacgtatgtagcgtacaaaatgatcgttcctggtatatagataaagagtcctatatatttgaaaatcgttacggctcgattaaactttaatgattgcatagtgaatatatcattaggatttaactccttgactatcatggcggcgccagaaattaccatcaaaagcattaatacagttatgccgatcgcagttaaaacggttatagcatccaccatttatatctaaaaattagatcaaagaatatgtgacaaagtcctagttgtatactgagaattgacgaaacaatgtttcttacatatttttttcttattagtaactgacttaatagtaggaactggaaagctagacttgattattctataagtatagatacccttccagataatgttctctttgataaaagttccagaaaatgtagaattttttaaaaagttatcttttgctattaccaagattgtgtttagacgcttattattaatatgagtgatgaaatccacaccgcctctagatatcgcctttatttccacattagatggtaaatccaatagtgaaactatctttttaggaatgtatggactcgcgtttagaggagtgaacgtcttgggcgtcggaaaggatgattcgtcaaacgaataaacaatttcacaaatggatgttaatgtattagtaggaaattttttgacgctagtggaattgaagattctaatggatgatgttctacctatttcatccgataacatgttaatttccgacaccaacggttttaatatttcgatgatatacggtagtctctctttcggacttatatagcttattccacaatacgagtcattatatactccaaaaaacaaaataactagtataaaatctgtatcgaatgggaaaaacgaaattatcgacataggtatagaatccggaacattgaacgtattaatacttaattctttttctgtggtaagtaccgataggttattgacattgtatggttttaaatattctataacttgagacttgatagatattagtgatgaattgaaaattatttttatcaccacgtgtgtttcaggatcatcgtcgacgcccgtcaaccaaccgaatggagtaaaataaatatcattaatatatgctctagatattagtatttttattaatcctttgattatcatcttctcgtaggcgaatgattccatgatcaagagtgatttgagaacatcctccggagtattaatgggcttagtaaacagtccatcgttgcaataataaaagttatccaagttaaaggatattatgcattcgtttaaagatatcacctcatctgacggagacaattttttggtaggttttagagactttgaagctacttgtttaacaaagttattcatcgtcgtctactattctatttaattttgtagttaatttatcacatatcacattaattgactttttggtccatttttccatacgtttatattcttttaatcctgcgttatccgtttccgttatatccagggatagatcttgcaagttaaatagaatgctcttaaataatgtcattttcttatccgctaaaaatttaaagaatgtataaacctttttcagagatttgaaactcttaggtggtgtcctagtacacaatatcataaacaaactaataaacattccacattcagattccaacagctgattaacttccacattaatacagcctattttcgctccaaatgtacattcgaaaaatctgaataaaacatcgatgtcacaatttgtattatccaatacagaatgtttgtgattcgtgttaaaaccatcggagaaggaatagaaataaaaattattatagtggtggaattcagttggaatattgcctccggagtcataaaaggatactaaacattgttttttatcataaattacacatttccaatgagacaaataacaaaatccaaacattacaaatctagaggtagaacttttaattttgtctttaagtatatacgataagatatgtttattcataaacgcgtcaaatttttcatgaatcgctaaggagtttaagaatctcatgtcaaattgtcctatataatccacttcggatccataagcaaactgagagactaagttcttaatacttcgattgctcatccaggctcctctctcaggctctattttcatcttgacgacctttggattttcaccagtatgtattcctttacgtgataaatcatcgattttcaaatccatttgtgagaagtctatcgccttagatactttttcccgtagtcgaggtttaaaaaaatacgctaacggtatactagtaggtaactcaaagacatcatatatagaatggtaacgcgtctttaactcgtcggttaactctttcttttgatcgagttcgtcgctactattgggtctgctcaggtgccccgactctactagttccaacatcataccgataggaatacaagacactttgccagcggttgtagatttatcatatttctccactacatatccgttacaatttgttaaaaatttagatacatctatattgctacataatccagctagtgaatatatatgacataataaattggtaaatcctagttctggtattttactaattactaaatctgtatatctttccatttatcatggaaaagaatttaccagatatcttcttttttccaaactgcgttaatgtattctcttacaaatattcacaagatgaattcagtaatatgagtaaaacggaacgtgatagtttctcattggccgtgtttccagttataaaacatagatggcataacgcacacgttgtaaaacataaaggaatatacaaagttagtacagaagcacgtggaaaaaaagtatctcctccatcactaggaaaacccgcacacataaacctaaccgcgaagcaatatatatacagtgaacacacaataagctttgaatgttatagttttctaaaatgtataacaaatacagaaatcaattcgttcgatgagtatatattaagaggactattagaagctggtaatagtttacagatattttccaattccgtaggtaaacgaacagatactataggtgtactagggaataagtatccatttagcaaaattccattggcctcattaactcctaaagcacaacgagagatattttcagcgtggatttctcatagacctgtagttttaactggaggaactggagtgggtaagacgtcacaggtacccaagttattgctttggtttaattatttatttggtggattctctactctagataaaatcactgactttcacgaaagaccagtcattctatctcttcctaggatagctttagttagattgcatagcaataccattttaaaatcattgggatttaaggtactagatggatctcctatttctttacggtacggatctataccggaagaattaataaacaaacaaccaaaaaaatatggaattgtattttctacccataagttatctctaacaaaactatttagttatggcactcttattatagacgaagttcatgagcatgatcaaataggagatattattatagcagtagcgagaaagcatcatacgaaaatagattctatgtttttaatgactgccacgttagaggatgacagggaacggctaaaagtatttttacctaatcccgcatttatacatattcctggagatacactgtttaaaattagcgaggtatttattcataataagataaatccatcttccagaatggcatacatagaagaagaaaagagaaatttagttactgctatacagatgtatactcctcctgatggatcatccggtatagtctttgtggcatccgttgcacagtgtcacgaatataaatcatatttagaaaaaagattaccgtatgatatgtatattattcatggtaaggtcttagatatagacgaaatattagaaaaagtgtattcatcacctaatgtatcgataattatttctactccttatttggaatccagcgttactatacgcaatgttacacacatttatgatatgggtagagtttttgtccccgctccttttggaggatcgcaacaatttatttctaaatctatgagagatcaacgaaaaggaagagtaggaagagttaatcctggtacatacgtctatttctatgatctgtcttatatgaagtctatacagcgaatagattcagaatttctacataattatatattgtacgctaataagtttaatctaacactccccgaagatttgtttataatccctacaaatttggatattctatggcgtacaaaggaatatatagactcgttcgatattagtacagaaacatggaataaattattatccaattattatatgaagatgatagagtatgctaaactttatgtactaagtcctattctcgctgaggagttggataactttgagaggacgggagaattaactagtattgtacgagaagccattttatctctaaatttacaaattaagattttaaattttaaacataaagatgatgatacgtatatacacttttgtaaaatattattcggtgtctataacggaacaaacgctactatatattatcatagacctctaacgggatatatgaatatgatttcagatactatatttgttcctgtagataataactaaaaatcaaactctaatgaccacatctttttttagagatgaaaaattttccacatctccttttgtagacacgactaaacattttgcagaaaaaagtttattagtgtttagataatcgtatacttcatcagtgtagatagtaaatgtgaacagataaaaggtattcttgctcaatagattggtaaattccatagaatatattaatcctttcttcttgagatcccacatcatttcaaccagagacgttttatccaatgatttacctcgtactataccacatacaaaactagattttgcagtgacgtcgtacctggtattcctaccaaacaaaattttacttttagttcttttagaaaattctaaggtagaatctctatttgccaatatgtcatctatggaattaccactagcaaaaaatgatagaaatatatattgatacatcgcagctggttttgatctactatactttaaaaacgaatcagattccataattgcctgtatatcatcagctgaaaaactatgttttacacgtattccttcggcatttctttttaatgatatatcttgtttagacaatgataaagttatcatgtccatgagagacgcgtctccgtatcgtataaatatttcattagatgttagacgcttcattaggggtatacttctataaggtttcttaatcagtccatcattggttgcgtcaagaactactatcggatgttgttgggtatctctagtgttacacatggccttactaaagtttgggtaaataactatgatatctctattaattatagatgcatatatttcattcgtcaaggatattagtatcgacttgctatcgtcattaatacgtgtaatgtaatcatataaatcatgcgatagccaaggaaaatttaaatagatgttcatcatataatcgtcgctataattcatattaatacgttgacattgactaatttgtaatatagcctcgccacgaagaaagctctcgtattcagtttcatcgataaaggataccgttaaatataactggttgccgatagtctcatagtctattaagtggtaagtttcgtacaaatacagaatccctaaaatattatctaatgttggattaatctttaccataactgtataaaatggagacggagtcataactattttaccgtttgtacttactggaatagatgaaggaataatctccggacatgctggtaaagacccaaatgtctgtttgaagaaatccaatgttccaggtcctaatctcttaacaaaaattacgatattcgatcccgatatcctttgcattctatttaccagcatatcacgaactatattaagattatctatcatgtctattctcccaccgttatataaatcgcctccgctaagaaacgttagtatatccatacaatggaatacttcatttctaaaatagtattcgttttctaattctttaatgtgaaatcgtatactagaaagggaaaaattatctttgagttttccgttagaaaagaaccacgaaactaatgttctgattgcgtccgattccgttgctgaattaatggatttacaccaaaaactcatataacttctagatgtagaagcattcgctaaaaaattagtagaatcaaaggatataagtagatgttccaacaagtgagcaattcccaagatttcatctatatcattctcgaatccgaaattagaaattcccaagtagatatcctttttcatccgatcgttgatgaaaatacgaactttattcggtaagacaatcatttactaaggagtaaaataggaagtaatgttcgtatgtcgttatcatcgtataaattaaaggtgtgttttttaccattaagtgacattataattttaccaatattggaattataatataggtgtatttgcgcactcgcgacggttgatgcatcggtaaatatagctgtatctaatgttctagtcggtatttcatcatttcgctgtctaataatagcgttttctctatctgtttccattacagctgcctgaagtttattggtcggataatatgtaaaataataagaaatacatacgaataacaaaaataaaataagatataataaagatgccatttagagatctaattttgtttaacttgtccaaattcctacttacagaagatgaggaatcgttggagatagtgtcttccttatgtagaggatttgaaatatcttataatgacttgataacttactttccagataggaaataccataaatatatttataaagtatttgaacatgtagatttatcggaggaattaagtatggaattccatgatacaactctgagagatttagtctatcttagattgtacaagtattccaagtgtatacggccgtgttataaattaggagataatctaaaaggcatagttgttataaaggacaggaatatttatattagggaagcaaatgatgacttgatagaatatctcctcaaggaatacactcctcagatttatacatattctaatgagcgcgtccccataactggttcaaaattaattctttgtggattttctcaagttacatttatggcgtatacaacgtcgcatataacaacaaataaaaaggtagatgttctcgtttccaaaaaatgtatagatgaactagtcgatccaataaattatcaaatacttcaaaatttatttgataaaggaagcggaacaataaacaaaatactcaggaagatattttattcggtaacaggtggccaaactccataggtagctttttctatttcggattttagaatttccaaattcaccagcgatttatcggttttggtgaaatccaaggatttattaatgtccacaaatgccatttgttttgtctgtggattgtatttgaaaatggaaacgatgtagttagatagatgcgctgcgaagtttcctattagggttccgcgcttcacgtcacccagcatacttgaatcaccatcctttaaaaaaaatgataagatatcaacatggagtatatcatactcggattttaattcttctactgcatcactgacattttcacaaatactacaatacggtttaccgaaaataatcagtacgttcttcatttatgggtatcaaaaacttaaaatcgttactgctggaaaataaatcactgacgatattagatgataatttatacaaagtatacaatggaatatttgtggatacaatgagtatttatatagccgtcgccaattgtgtcagaaacttagaagagttaactacggtattcataaaatacgtaaacggatgggtaaaaaagggagggcatgtaaccctttttatcgatagaggaagtataaaaattaaacaagacgttagagacaagagacgtaaatattctaaattaaccaaggacagaaaaatgttagaattagaaaagtgtacatccgaaatacaaaatgttaccggatttatggaagaagaaataaaggcagaaatgcaattaaaaatcgataaactcacatttcaaatatatttatctgattctgataacataaaaatatcattgaatgagatactaacacatttcaacaataatgagaatgttacattattttattgtgatgaacgagacgcagaattcgttatgtgtctcgaggctaaaacacatttctctaccacaggagaatggccgttgataataagtaccgatcaggatactatgctatttgcatctgctgataatcatcctaagatgataaaaaacttaactcaactgtttaaatttgttccctcggcagaggataactatttagcaaaattaacggcgttagtgaatggatgtgatttctttcctggactctatggggcatctataacacccaccaacttaaacaaaatacaattgtttagtgattttacaatcgataatatagtcactagtttggcaattaaaaattattatagaaagactaactctaccgtagacgtgcgtaatattgttacgtttataaacgattacgctaatttagacgatgtctactcgtatattcctccttgtcaatgcactgttcaagaatttatattttccgcattagatgaaaaatggaatgaatttaaatcatcttatttagaaagcgtgccgttaccctgccaattaatgtacgcgttagaaccacgcaaggagattgatgtttcagaagttaaaactttatcatcttatatagatttcgaaaatactaaatcagatatcgatgttataaaatctatatcctcgatcttcggatattctaacgaaaactgtaacacgatagtattcggcatctataaggataatttactactgagtataaataattcattttactttaacgatagtctgttaataaccaatactaaaagtgataatataataaatataggttactagattaaaaatggtgttccaactcgtgtgctctacatgcggtaaagatatttctcacgaacgatataaattgattatacgaaaaaaatcattaaaggatgtactcgtcagtgtaaagaacgaatgttgtaggttaaaattatctacacaaatagaacctcaacgtaacttaacagtgcaacctctattggatataaactaatatggatccggttaattttatcaagacatatgcgcctagaggttctattatttttattaattataccatgtcattaacaagtcatttgaatccatcgatagaaaaacatgtgggtatttattatggtacgttattatcggaacacttggtagttgaatctacctatagaaaaggagttcgaatagtcccattggatagtttttttgaaggatatcttagtgcaaaagtatacatgttagagaatattcaagttatgaaaatagcagctgatacgtcattaactttattgggtattccgtatggatttggtcataatagaatgtattgttttaaattggtagctgactgttataaaaatgccggtattgatacatcgtctaaacgaatattgggcaaagatatttttctgagccaaaacttcacagacgataatagatggataaagatatatgattctaataatttaacattttggcaaattgattaccttaaagggtgagttaatatgcataactactcctccgttgttttttccctcgttctttttcttaacgttgtttgccatcactctcataatgtaaagatattctaaaatggtaaacttttgcatatcggacgcagaaattggtataaatgttgtaattgtattatttcccgtcaatggactagtcacagctccatcagttttatatcctttagagtatttctcactcgtgtctaacattctagagcattccatgatctgtttatcgttgatattggccggaaagatagattttttattttttattatattactattggcaattgtagatataacttctggtaaatatttttctaccttttcaatctcttctattttcaagccggctatatattctgctatattgttgctagtatcaataccttttctggctaagaagtcatatgtggtattcactatatcagttttaactggtagttccattagcctttccacttctgcagaataatcagaaattggttctttaccagaaaatccagctactataataggctcaccgatgatcattggcaaaatcctatattgtaccagattaatgagagcatatttcatttccaataattctgctagttcttgagacattgatttatttgatgaatctagttggttctctagatactctaccatttctgccgcatacaataacttgttagataaaatcagggttatcaaagtgtttagcgtggctagaatagtgggcttgcatgtattaaagaatgcggtagtatgagtaaaccgttttaacgaattatatagtctccagaaatctgtggcgttacatacatgagccgaatgacatcgaagattgtccaatatttttaatagctgctctttgtccattatttctatatttgactcgcaacaattgtagataccattaatcaccgattcctttttcgatgccggacaatagcacaattgtttagctttggactctatgtattcagaattaatagatatatctctcaatacagattgcactatacattttgaaactatgtcaaaaattgtagaacgacgctgttctgcagccatttaactttaaataatttacaaaaatttaaaatgagcatccgtataaaaatcgataaactgcgccaaattgtggcatatttttcagagttcagtgaagaagtatctataaatgtagactcgacggatgagttaatgtatatttttgccgccttgggcggatctgtaaacatttgggccattatacctctcagtgcatcagtgttttaccgaggagccgaaaatattgtgtttaatcttcctgtgtccaaggtaaaatcgtgtttgtgtagttttcacaatgatgccatcatagatatagaacctgatctggaaaataatctagtaaaactttctagttatcatgtagtaagtgtcgattgtaacaaggaactgatgcctattaggacagatactactatttgtctaagtatagatcaaaagaaatcttacgtgtttaattttcacaagtatgaagaaaaatgttgtggtagaaccgtcattcattaagtgacattataattttaccaatattggaattataatataggtgtatttgcgcacttgcgacggttgatgcatcggtaaatatagctgtatctaatgttctagtcggtatttcatcatttcgctgtctaataatagcgttttctctatctgtttccattacagctgcctgaagtttattggtcggataatatgtaaaataataagaaatacatacgaataacaaaaataaaataagatataataaagatgccatttagagatctaattttgtttaacttgtccaaattcctacttacagaagatgaggaatcgttggagatagtgtcttccttatgtagaggatttgaaatatcttataatgacttgataacttactttccagataggaaataccataaatatatttataaagtatttgaacatgtagatttatcggaggaattaagtatggaattccatgatacaactctgagagatttagtctatcttagattgtacaagtattccaagtgtatacggccgtgttataaattaggagataatctaaaaggcatagttgttataaaggacaggaatatttatattagggaagcaaatgatgacttgatagaatatctcctcaaggaatacactcctcagatttatacatattctaatgagcgcgtccccataactggttcaaaattaattctttgtggattttctcaagttacatttatggcgtatacaacgtcgcatataacaacaaataaaaaggtagatgttctcgtttccaaaaaatgtatagatgaactagtcgatccaataaattatcaaatacttcaaaatttatttgataaaggaagcggaacaataaacaaaatactcaggaagatattttattcggtaacaggtggccaaactccataggtagctttttctatttcggattttagaatttccaaattcaccagcgatttatcggttttggtgaaatccaaggatttattaatgtccacaaatgccatttgttttgtctgtggattgtatttgaaaatggaaacgatgtagttagatagatgcgctgcgaagtttcctattagggttccgcgcttcacgtcacccagcatacttgaatcaccatcctttaaaaaaaatgataagatatcaacatggagtatatcatactcggattttaattcttctactgcatcactgacattttcacaaatactacaatacggtttaccgaaaataatcagtacgttcttcatttatgggtatcaaaaacttaaaatcgttactgctggaaaataaatcactgacgatattagatgataatttatacaaagtatacaatggaatatttgtggatacaatgagtatttatatagccgtcgccaattgtgtcagaaacttagaagagttaactacggtattcataaaatacgtaaacggatgggtaaaaaagggagggcatgtaaccctttttatcgatagaggaagtataaaaattaaacaagacgttagagacaagagacgtaaatattctaaattaaccaaggacagaaaaatgctagaattagaaaagtgtacatccgaaatacaaaatgttaccggatttatggaagaagaaataaaggcagaaatgcaattaaaaatcgataaactcacatttcaaatatatttatctgattctgataacataaaaatatcattgaatgagatactaacacatttcaacaataatgagaatgttacattattttattgtgatgaacgagacgcagaattcgttatgtgtctcgaggctaaaacacatttctctaccacaggagaatggccgttgataataagtaccgatcaggatactatgctatttgcatctgctgataatcatcctaagatgataaaaaacttaactcaactgtttaaatatgttccatctgcagaggataactatttagcaaaattaacggcgttagtgaatggatgtgatttctttcctggactctatggggcatctataacacccaccaacttaaacaaaatacaattgtttagtgattttacaatcgataatatagtcactagtttggcaattaaaaattattatagaaagactaactctaccgtagacgtgcgtaatattgttacgtttataaacgattacgctaatttagacgatgtctactcgtatgttcctccttgtcaatgcactgttcaagaatttatattttccgcattagatgaaaaatggaatgaatttaaatcatcttatttagagaccgtgccgttaccctgtcaattaatgtacgcgttagaaccacgtaaggagattgatgtttcagaagttaaaactttatcatcttatatagatttcgaaaatactaaatcagatatcgatgttataaaatctatatcctcgatcttcggatattctaacgaaaactgtaacacgatagtattcggcatctataaggataatttactactgagtataaataattcattttactttaacgatagtctgttaataaccaatactaaaagtgataatataataaatataggttactagattaaaaatggtgttccaactcgtgtgctctacatgcggtaaagatatttctcacgaacgatataaattgattatacgaaaaaaatcattaaaggatgtactcgtcagtgtaaagaacgaatgttgtaggttaaaattatctacacaaatagaacctcaacgtaacttaacagtgcaacctctattggatataaactaatatggatccggttaattttatcaagacatatgcgcctagaggttctattatttttattaattataccatgtcattaacaagtcatttgaatccatcgatagaaaaacatgtgggtatttattatggtacgttattatcggaacacttggtagttgaatctacctatagaaaaggagttcgaatagtcccattggatagtttttttgaaggatatcttagtgcaaaagtatacatgttagagaatattcaagttatgaaaatagcagctgatacgtcattaactttattgggtattccgtatggatttggtcataatagaatgtattgttttaaattggtagctgactgttataaaaatgccggtattgatacatcgtctaaacgaatattgggcaaagatatttttctgagccaaaacttcacagacgataatagatggataaagatatatgattctaataatttaacattttggcaaattgattaccttaaagggtgagttaatatgcataactactcctccgttgttttttccctcgttctttttcttaacgttgtttgccatcactctcataatgtaaagatattctaaaatggtaaacttttgcatatcggacgcagaaattggtataaatgttgtaattgtattatttccatattattatgaagactcctggtaatactgatggcgttttccagggaatattctatgactgaatgttctcaagaactacaaaagttttctttcaaaatagctatctcgtctctcaacaaactacgaggattcaaaaagagagtcaatgtttttgaaactagaatcgtaatggataatgacgataacattttaggaatgttgttttcggatagagttcaatcctttaagatcaacatctttatggcgtttttagattaatactttcaatgagataaatatgggtggcggagtaagtgttgagctccctaaacgggatccgcacccgggagtacccactgatgagatgttattaaacgtggataaaatgcatgacgtgatagctcccgctaagcttttagaatatgtgcatataggaccactagcaaaagataaagaggataaagtaaagaaaagatatccagagtttagattagtcaacacaggacccggtggtctttcggcattgttaagacaatcgtataatggaaccgcacccaattgctgtcgcacttttaatcgtactcattattggaagaaggatggaaagatatcagataagtatgaagagggtgcagtattagaatcgtgttggccagacgttcacgacactggaaaatgcgatgttgatttattcgactggtgtcagggggatacgttcgatagaaacatatgccatcagtggatcggttcagcctttaataggagtaatagaactgtagagggtcaacaatcgttaataaatctgtataataagatgcaaacattatgtagtaaagatgctagtgtaccaatatgcgaatcatttttgcattatttacgcgcacacaatacagaagatagcaaagagatgatcgattatattctaagacaacagtctgcggactttaaacagaaatatatgagatgtagttatcccactagagataagttagaagagtcattaaaatatgcggaacctcgagaatgttgggatccagagtgttcgaatgccaatgttaatttcttactaacacgtaattataataatttaggactttgcaatattgtacgatgtaataccagcgtgaacaacttacagatggataaaacttcctcattaagattgtcatgtggattaagcaatagtgatagattttctactgttcccgtcaatagagcaaaagtagttcaacataatattaaacactcgttcgacctaaaattgcatttgatcagtttattatctctcttggtaatatggatactaattgtagctatttaaatgggtgccgcggcaagcatacagacgacggtgaatacactcagcgaacgtatctcgtctaaattagaacaagaagcgaacgctagtgctcaaacaaaatgtgatatagaaatcggaaatttttatatccgacaaaaccatggatgtaacctcactgttaaaaatatgtgctctgcggacgcggatgctcagttggatgctgtgttatcagccgctacagaaacatatagtggattaacaccggaacaaaaagcatacgtgccagctatgtttactgctgcgttaaacattcagacgagtgtaaacactgttgttagagattttgaaaattatgtgaaacagacttgtaattctagcgcggtcgtcgataacaaattaaagatacaaaacgtaatcatagatgaatgttacggagccccaggatctccaacaaatttggaatttattaatacaggatctagcaaaggaaattgtgccattaaagcgttgatgcaattgacgactaaggccactactcaaatagcacctagacaagttgctggtacaggagttcagttttatatgattgttatcggtgttataatattggcagcgttgtttatgtactatgccaagcgtatgttgttcacatccaccaatgataaaatcaaacttattttagccaataaggaaaacgtccattggactacttacatggacacattctttagaacttctccgatggttattgctaccacggatatgcaaaactgaaaatatattgataatattttaatagattaacatggaagttatcgctgatcgtctagacgatatagtgaaacaaaatatagcggatgaaaaatttgtagattttgttatacacggtctagagcatcaatgtcctgctatacttcgaccattaattaggttgtttattgatatactattatttgttatagtaatttatatttttacggtacgtctagtaagtagaaattatcaaatgttgttggtggtgctagtcatcacattaactattttttattactttatactataatagtactagactgacttctaacaaacatctcacctgccataaataaatgcttgatattaaagtcttctatttctaacactattccatctgtggaaaataatactctgacattatcgctaattgacacatcggtgagtgatatgcctataaagtaataatcttctttgggcacatataccagtgtaccaggttctaacaacctatttactggtgctcctgtagcatactttttctttaccttgagaatatccatcgtttgcttggtcaatagcgatatgtgattttttatcaaccactcaaaaaagtaattggagtgttcatatcctctacgggctattgtctcatggccgtgtatgaaatttaagtaacacgactgtggtagatttgttctatagagccgattgccgcaaatagatagaactaccaatatgtctgtacaaatgttaaacattaattgattaacagaaaaaacaatgttcgttctgggaatagaaaccagatcaaaacaaaattcgttagaatatatgccacgtttatacatggaatataaaataactacagtttgaaaaataacagtatcatttaaacatttaacttgcggggttaatctcacaactttactgtttttgaactgttcaaaatatagcatcgatccgtgagaaatacgtttagccgcctttaatagaggaaatcccaccgcctttctggatctcaccaacgacgatagttctgaccagcaactcatttcttcatcatccacctgttttaacatataataggcaggagatagatatccgtcattgcaatattccttctcgtaggcacacaatctaatattgataaaatctccattctcttctctgcatttattatcttgtctcggtggctgattaggctgtggtcttggtttaggccttggtctatcgttgttgaatctattttggtcattaaatctttcatttcttcctggtatatttctatcacctcgtttggttggatttttgtctatattatcgtttgtaacatcggtacgggtattcatttatcacaaaaaaaacttctctaaatgagtctactgctagaaaacctcatcgaagaagataccatattttttgcaggaagtatatctgagtatgatgatttacaaatggttattgccggcgcaaaatccaaatttccaagatctatgctttctatttttaatatagtacctagaacgatgtcaaaatatgagttggagttgattcataacgaaaatatcacaggagcaatgtttaccacaatgtataatataagaaacaatttgggtctaggagatgataaactaactattgaagccattgaaaactatttcttggatcctaacaatgaagttatgcctcttattattaataatacggatatgactgccgtcattcctaaaaaaagtggtaggagaaagaataagaacatggttatcttccgtcaaggatcatcacctatcttgtgcattttcgaaactcgtaaaaagattaatatttataaagaaaatatggaatccgcgtcgactgagtatacacctatcggagacaacaaggctttgatatctaaatatgcgggaattaatgtcctgaatgtgtattctccttccacatccataagattgaatgccatttacggattcaccaataaaaataaactagagaaacttagtactaataaggaactagaatcgtatagttctagccctcttcaagaacccattaggttaaatgattttctgggactattggaatgtgttaaaaagaatattcctctaacagatattccgacaaaggattgattactataaatggagaatgttcctaatgtatactttaatcctgtgtttatagagcccacgtttaaacattctttattaagtgtttataaacacagattaatagttttatttgaagtattcgttgtattcattctaatatatgtattttttagatctgaattaaatatgttcttcatgcctaaacgaaaaatacccgatcctattgatagattacgacgtgctaatctagcgtgtgaagacgataaattaatgatctatggattaccatggatgacaactcaaacatctgcgttatcaataaatagtaaaccgatagtgtataaagattgtgcaaagcttttgcgatcaataaatggatcacaaccagtatctcttaacgatgttcttcgcagatgatgattcattttttaagtatttggctagtcaagatgatgaatcttcattatctgatatattgcaaatcactcaatatctagactttctgttattattattgatccaatcaaaaaataaattagaagctgtgggtcattgttatgaatctctttcagaggaatacagacaattgacaaaattcacagactttcaagattttaaaaaactgtttaacaaggtccctattgttacagatggaagggtcaaacttaataaaggatatttgttcgactttgtgattagtttgatgcgattcaaaaaagaatcctctctagctaccaccgcaatagatcctgttagatacatagatcctcgtcgtgatatcgcattttctaacgtgatggatatattaaagtcgaataaagtgaacaataattaattctttattgtcatcatgaacggcggacatattcagttgataatcggccccatgttttcaggtaaaagtacagaattaattagacgagttagacgttatcaaatagctcaatataaatgcgtgactataaaatattctaacgataatagatacggaacgggactatggacgcatgataagaataattttgaagcattggaagcaactaaactatgtgatgtcttggaatcaattacagatttctccgtgataggtatcgatgaaggacagttctttccagacattgtttaattctgtgagcgtatggcaaacgaaggaaaaatagttatagtagccgcactcgatgggacatttcaacgtaaaccgtttaataatattttgaatcttattccattatctgaaatggtggtaaaactaactgctgtgtgtatgaaatgctttaaggaggcttccttttctaaacgattgggtgaggaaaccgagatagagataataggaggtaatgatatgtatcaatcggtgtgtagaaagtgttacgtcggctcataatattatattttttatctaaaaaactaaaaataaacattgattaaattttaatataatacttaaaaatggatgttgtgtcgttagataaaccgtttatgtattttgaggaaattgataatgagttagattacgaaccagaaagtgcaaatgaggtcgcaaaaaaactgccgtatcaaggacagttaaaactattactaggagaattattttttcttagtaagttacagcgacacggtatattagatggtgccaccgtagtgtatataggatcggctcctggtacacatatacgttatttgagagatcatttctataatttaggagtgatcatcaaatggatgctaattgacggccgccatcatgatcctattttaaatggattgcgtgatgtaactctagtgactcggttcgttgatgaggaatatctacgatccatcaaaaaacaactgcatccttctaagattattttaatttctgatgtaagatccaaacgaggaggaaatgaacctagtacggcggatttactaagtaattacgctctacaaaatgtcatgattagtattttaaaccccgtggcatctagtcttaaatggagatgcccgtttccagatcaatggatcaaggacttttatatcccacacggtaataaaatgttacaaccttttgctccttcatattcagctgaaatgagattattaagtatttataccggtgagaacatgagactgactcgagttaccaaattagacgctgtaaattatgaaaaaaagatgtactaccttaataagatcgtccgtaacaaagtagttgttaactttgattatcctaatcaggaatatgactattttcacatgtactttatgctgaggaccgtgtactgcaataaaacatttcctactactaaagcaaaggtactatttctacaacaatctatatttcgtttcttaaatattccaacaacatcaactgaaaaagttagtcatgaaccaatacaacgtaaaatatctagcaaaaattctatgtctaaaaacagaaatagcaagagatccgtacgcggtaataaatagaaacgtactactgagatatactaccgatatagagtataatgatttagttactttaataaccgttagacataaaattgattctatgaaaactgtgtttcaggtatttaacgaatcatccataaattatactccggttgatgatgattatggagaaccaatcattataacatcgtatcttcaaaaaggtcataacaagtttcctgtaaattttctatacatagatgtggtaatatctgacttatttcctagctttgttagactagatactacagaaactaatatagttaatagtgtactacaaacaggcgatggtaaaaagactcttcgtcttcccaaaatgttagagacggaaatagttgtcaagattctctatcgccctaatataccattaaaaattgttagatttttccgcaataacatggtaactggagtagagatagccgatagatctgttatttcagtcgctgattaatcaattagtagagatgagataagaacattataataatcaataatatatcttatatcttatatcttatatcttatatcttgtttagaaaaatgctaatattaaaatagctaacgctagtaatccaatcggaagccatttgatatctataatagggtatctaatttcctgatttaaatagcggacagctatattctcggtagctactcgtttggaatcacaaacattatttacatctaatttactatctgtaatggaaacgtttcccaatgaaatggtacaatccgatacattgcattttgttatatttttttttaaagaggctggtaacaacgcatcgcttcgtttacatggctcgtaccaacaataatagggtaatcttgtatctattcctatccgtactatgcttttatcaggataaatacatttacatcgtatatcgtctttgttagcatcacagaatgcataaatttgttcgtccgtcatgataaaaatttaaagtgtaaatataactattatttttatagttgtaataaaaagggaaatttgattgtatactttcggttctttaaaagaaactgacttgataaaaatggctgtaatctctaaggttacgtatagtctatatgatcaaaaagagattaatgctacagatattatcattagtcatgttaaaaatgacgacgatatcggtaccgttaaagatggtagactaggtgctatggatggggcattatgtaagacttgtgggaaaacggaattggaatgtttcggtcactggggtaaagtaagtatttataaaactcatatagttaagcctgaatttatttcagaaattattcgtttactgaatcatatatgtattcactgcggattattgcgttcacgagaaccgtattccgacgatattaacctaaaagagttatcgggacacgctcttaggagattaaaggataaaatattatccaagaaaaagtcatgttggaacagtgaatgtatgcaaccgtatcaaaaaattactttttcaaagaaaaaggtttgtttcgtcaacaagttggatgatattaacgttcctaattctctcatctatcaaaagttaatttctattcatgaaaagttttggccattattagaaattcatcaatatccagctaacttattttatacagactactttcccatccctccgttgattattagaccggctattagtttttggatagatagtatacccaaagagaccaatgaattaacttacttattaggtatgatcgttaagaattgtaacttgaatgctgatgaacaggttatccagaaggcggtaatagaatacgatgatattaaaattatttctaataacactaccagtatcaatttatcatatattacatccggcaaaaataatatgattagaagttatatcgtcgcccgacgaaaagatcagaccgctagatctgtaattggtcccagtacatctatcaccgttaatgaggtaggaatgcccgcatatattagaaatacacttacagaaaagatatttgttaatgcctttacagtggataaagttaaacaactattagcgtcaaaccaagttaaattttactttaataaacgattaaaccaattaacaagaatacgccaaggaaagtttattaaaaataaaatacatttattgcctggtgattgggtagaagtagctgttcaagaatatacaagtattatttttggaagacagccgtctctacatagatacaacgtcatcgcttcatctatcagagctaccgaaggagatactatcaaaatatctcccggaattgccaactctcaaaatgctgatttcgacggggatgaggaatggatgatattagaacaaaatcctaaagctgtaattgaacaaagtattcttatgtatccgacgacgttactcaaacacgatattcatggagcccccgtttatggatctattcaagatgaaatcgtagcagcgtattcattgtttaggatacaagatctttgtttagatgaagtattgaacatcttggggaaatatggaagagagttcgatcctaaaggtaaatgtaaattcagcggtaaagatatctatacttacttgataggtgaaaagattaattatccgggtctcttaaaggatggtgaaattattgcaaacgacgtagatagtaattttgttgtggctatgaggcatctgtcattggctggactcttatccgatcataagtcgaacgtggaaggtatcaactttattatcaagtcatcttatgtttttaagagatatctatctatttacggttttggggtgacattcaaagatctgagaccaaattcgacgttcactaataaattggaggccatcaacgtagaaaaaatagaacttatcaaagaagcatacgccaaatatctcaacgatgtaagagacgggaaaatagttccattatctaaagctttagaggcggactatgtggaatccatgttatccaacttgacaaatcttaatatccgagagatagaagaacatatgagacaaacgctgatagatgatccagataataacctcctgaaaatggccaaagcgggttataaagtaaatcccacagaactaatgtatattctaggtacgtatggacaacaaaggattgatggtgaaccagcagagactcgagtattgggtagagttttaccttactatcttccagactctaaggatccagaaggaagaggttatattcttaattctttaacaaaaggattaacgggttctcaatattacttttcgatgctggttgcaagatctcaatctactgatatcgtctgtgaaacatcacgtaccggaacactggctagaaaaatcattaaaaagatggaggatatggtggtcgacggatacggacaagtagttataggtaatacgctcatcaagtacgccgccaattataccaaaattctaggctcagtatgtaaacctgtagatcttatctatccagatgagtccatgacttggtatttggaaattagtgctctgtggaataaaataaaacagggattcgtttactctcagaaacagaaacttgcaaagaagacattggcgccgtttaatttcctagtattcgtcaaacccaccactgaggataatgctattaaggttaaggatctgtacgatatgattcataacgtcattgatgatgtgagagagaaatacttctttacggtatctaatatagattttatggagtatatattcttgacgcatcttaatccttctagaattagaattacaaaagaaacggctatcactatctttgaaaagttctatgaaaaactcaattatactctaggtggtggaactcctattggaattatttctgcacaggtattgtctgagaagtttacacaacaagccctgtccagttttcacactactgaaaaaagtggtgccgtcaaacaaaaacttggtttcaacgagtttaataacttgactaatttgagtaagaataagaccgaaattatcactctggtatccgatgatatctctaaacttcaatctgttaagattaatttcgaatttgtatgtttgggagaattaaatccaaacatcactcttcgaaaagaaacagataggtatgtagtagatataatagtcaatagattatacatcaagagagcagaaataaccgaattagtcgtcgaatatatgattgaacgattcatctcctttagcgtcattgtaaaggaatggggtatggagacattcattgaggacgaggataatattagatttactgtctacctaaatttcgttgaaccggaagaattgaatcttagtaagtttatgatggttcttccgggggcagccaacaagggaaagattagtaaattcaagattcctatctctgactatacgggatatgacgacttcaatcaaacaaaaaagctcaataagatgactgtagaactcatgaatctaaaagaattgggttctttcgatttggaaaacgtcaacgtgtatcctggagtatggaatacatacgatatcttcggtatcgaggccgctcgtgaatacttgtgcgaagccatgttaaacacctatggagaagggttcgattatctgtatcagccttgtgatcttctcgctagtttactatgtgctagttacgaaccagaatcagtgaataaattcaagttcggcgcagctagtactcttaagagagctacgttcggagacaataaagcattgttaaacgcggctcttcataaaaagtcagaacctattaacgataatagtagctgccacttttttagcaaggtccctaatataggaactggatattacaaatactttatcgacttgggtcttctcatgagaatggaaaggaaactatctgataagatatcttctcaaaagatcaaggaaatggaagaaacagaagacttttaattcttatcaataacatatttttctatgatctgtcttttaaacgatggattttccacaaatgcgcctctcaagtccctcatagaatgatacacgtataaaaaatatagcataggcaatgactccttatttttagacattagatatgccaaaatcatagccccgcttctatttactcccgcagcacaatgaaccaacacgggctcgtttcgttgatcacatttagataaaaaggcggttacgtcgtcaaaatatttactaatatcggtagttgtatcatctaccaacggtatatgaataatattaatattagagttaggtaatgtatatttatccatcgtcaaatttaaaacatatttgaacttaacttcagatgatggtgcatccatagcatttttataatttcccaaatacacattattggttacccttgtcattatagtgggagatttggctctgtgcatatctccagttgaacgtagtagtaagtatttatacaaacttttcttatccatttataacgtacaaatggataaaactactttatcggtaaacgcgtgtaatttagaatacgttagagaaaaggctatagtaggcgtacaagcagccaaaacatcaacacttatattctttgttattatattggcaattagtgcgctattactctggtttcagacgtctgataatccagtctttaatgaattaacgagatatatgcgaattaaaaatacggttaacgattggaaatcattaacggatagcaaaacaaaattagaaagtgatagaggtagacttctagccgctggtaaggatgatatattcgacttcaaatgtgtggatttcggcgcctattttatagctatgcgattggataagaaaacatatctgccgcaagctattaggcgaggtactggagacgcgtggatggttaaaaaggcggcaaaggtcgatccatctgctcaacaattttgtcagtatttgataaaacacaagtctaataatgttattacttgtggtaatgagatgttaaatgaattaggttatagcggttattttatgtcaccgcattggtgttccgattttagtaatatggaatagtgttagataaatgcggtaacgaatgttcctgtaaggaaccataacagcttagatttaacgttaaagatgagcataaacataataaacaaaattacaatcaaacttataacattaatatcaaacaatccaaaaaatgaaatcagtggagtagtaaacgcgtacataactcctggataacgtttagcagctgccgttcctattctagaccaaaaattcggtttcatgttttcgaaacggtattctgcaacaagtcgaggatcgtgttctacatatttggcggcattatccagtatctgcctattgatcttcatttcgttttcaattctggctatttcaaaataaaatcccgatgatagacctccagactttataatttcatctacgatgttcagcgccgtagtaactctaataatataggctgataagctaacatcataccctcctgtatatgtgaatatggcatgatttttgtccattacaagctcggttttaactttattgcctgtaataatttctctcatctgtaggatatctatttttttgtcatgcattgccttcaagacgggacgaagaaacgtaatatcctcaataacgttatcgttttctacaataactacatattctacctttttattttctaactcggtaaaaaaattagaatcccatagggctaaatgtctagcgatatttcttttcgtttcctctgtacacatagtgttacaaaaccctgaaaagaagtgagtatacttgtcatcatttctaatgtttcctccagtccactgtataaacgcataatccttgtaatgatctggatcatccttgactaccacaacatttcttttttctggcataacttcgttgtcctttacatcatcgaacttctgatcattaatatgctcatgaacattaggaaatgtttctgatggaggtctatcaataactggcacaacaataacaggagttttcaccgccgccatttagttattgaaattaatcatatacaactctttaatacgagttatattttcgtctatccattgtttcacattgacatatttcgacaaaaagatataaaatgcgtattccaatgcttctctgtttaatgaattactaaaatatacaaacacgtcactgtctggcaataaatgatatcttagaatattgtaacaatgtaaggaaccataacagtttagatttaacgttaaagatgagcataaacataataaacaaaattacaatcaaacctataacattaatatcaaacaatccaaaaaatgaaatcagtggagtagtaaacgcgtacataactcctggataacgtttagcagctgccgttcctattctagaccaaaaatttggtttcatgttttcgaaacggtattctgcaacaagtcggggatcgtgttctacatatttggcggcattatccagtatctgcctattgatcttcatttcgttttcgattctggctatttcaaaataaaatcccgatgatagacctccagactttataatttcatctacgatgttcagcgccgtagtaactctaataatataggctgataagctaacatcataccctcctgtatatgtgaatatggcatgatttttgtccattacaagctcggttttaactttattgcctgtaataatttctctcatctgtaggatatctatttttttgtcatgcattgccttcaagacgggacgaagaaacgtaatatcctcaataacgttatcgttttctacaataactacatattctacctttttattttctaactcggtaaaaaaattagaatcccatagggctaaatgtctagcgatatttcttttcgtttcctctgtacacatagtgttacaaaaccctgaaaagaagtgagtatacttgtcatcatttctaatgtttcctccagtccactgtataaacgcataatccttgtaatgatctggatcatccttgactaccacaacatttcttttttctggcataacttcgttgtcctttacatcatcgaacttctgatcattaatatgctcatgaacattaggaaatgtttctgatggaggtctatcaataactggcacaacaataacaggagttttcaccgccgccatttagttattgaaattaatcatatacaactctttaatacgagttatattttcgtctatccattgtttcacatttacatatttcgacaaaaagatataaaatgcgtattccaatgcttctctgtttaatgaattactaaaatatacaaacacgtcactgtctggcaataaatgatatcttagaatattgtaacaatttattttgtattgcacatgttcgtgatctatgagttcttcttcgaatggcataggatctccgaatctgaaaacgtataaataggagttagaataataatatttgagagtattggtaatatataaactctttagcggtataattagtttttttctctcaatttctatttttagatgtgatggaaaaatgactaattttgtagcattagtatcatgaactctaatcaaaatcttaatatcttcgtcacacgttagctctttgaagtttttaagagatgcatcagttggttctacagatggagtaggtgcaacaattttttgttctacacatgtatgtactggagccattgttttaactataatggtgcttgtatcgaaaaactttaatgcagatagcggaagctcttcgccgcgactttctacgtcgtaattgggttctaacgccgatctctgaatggatactagttttctaagttctaatgtgattctctgaaaatgtaaatccaattcctccggcattatagatgtgtatacatcggtaaataaaactatagtatccaacgatcccttctcgcaaattctagtcttaaccaaaaaatcgtatataaccacggagatggcgtatttaagagtggattcttctaccgttttgttcttggatgtcatataggaaactataaagtccgcactactgttaagaatgattactaacgcaactatatagtttaaattaagcattttggaaacataaaataactctgtagacgatacttgactttcgaataagtttgcagacaaacgaagaaagaacagacctctcttaatttcagaagaaaactttttttcgtattcctgacgtctagagtttatatcaataagaaagttaagaattagtcggttaatgttgtatttcattacccaagtttgagatttcataatattatcaaaagacatgataatattaaagataaagcgctgactatgaacgaaatagctatatggttcgctcaagaatatagtcttgttaaacgtggaaacgataactgtatttttaatcacgtcagcggcatctaaattaaatataggtatatttattccacacactctacaatatgccacaccatcttcataataaataaattcgttagcaaaattattaattttagtgaaatagttagcgtcaactttcatagcttccttcaatctaatttgatgctcacacggtgcgaattccactctaacatcccttttccatgcctcaggttcatcgatctctataatatctagttttttgcgtttcacaaacacaggctcgtctctcgcgatgagatctgtatagtaactatgtaaatgataactagatagaaagatgtagctatatagatgacgatcctttaagagaggtataataactttaccccaatcagatagactgttgttatggtcttcggaaaaagaatttttataaatttttccagtattttccaaatatacgtacttaacatctaaaaaatccttaatgataataggaatggataatccgtctattttataaagaaatacatatcgcacattatacttttttttggaaatgggaataccgatgtgtctacataaatatgcaaagtctaaatattttttagagaatcttagttggtccaaattcttttccaagtacggtaatagatttttcatattgaacggtatcttcttaatctctggttctagttccgcattaaatgatgaaactaagtcactatttttataactaacgattacatcacctctaacatcatcatttaccagaatactgatcttcttttgtcgtaaatacatgtctaatgtgttaaaaaaaagatcatacaagttatacgtcatttcatctgtggtattcttgtcattgaaggataaactcgtactaatctcttctttaacagcctgttcaaatttatatcctatatacgaaaaaatagcaaccagtgtttgatcatccgcgtcaatattctgttctatcgtagtgtataacaatcgtatatcttcttctgtgatagtcgatacgttataaaggttgataacgaaaatatttttatttcgtgaaataaagtcatcgtaggattttggacttatattcgcgtctagtagatatgcttttatttttggaatgatctcaattagaatagtctctttagagtccatttaaagttacaaacaactaggaaattggtttatgatgtataatttttttagtttttatagattctttattctatacttaaaaaatgaaaataaatacaaaggttcttgagggttgtgttaaattgaaagcgagaaataatcataaattatttcattatcgcgatatccgttaagtttgtatcgtaatggcgtggtcaattacgaataaagcggatactagtagcttcacaaagatggctgaaatcagagctcatctaaaaaatagcgctgaaaataaagataaaaacgaggatattttcccggaagatgtaataattccatctactaagcccaaaaccaaacgagccactactcctcgtaaaccagcggctactaaaagatcaaccaaaaaggaggaagtggaagaagaagtagttatagaggaatatcatcaaacaactgaaaaaaattctccatctcctggagtcagcgacattgtagaaagcgtggccgctgtagagctcgatgatagcgacggggatgatgaacctatggtacaagttgaagctggtaaagtaaatcatagtgctagaagcgatctctctgacctaaaggtggctaccgacaatatcgttaaagatcttaagaaaattattactagaatctctgcagtatcgacggttctagaggatgttcaagcagctggtatctctagacaatttacttctatgactaaagctattacaacactatctgatctagtcaccgagggaaaatctaaagttgttcgtaaaaaagttaaaacttgtaagaagtaaatgcgtgcacttttttataaagatggtaaactctttaccgataataattttttaaatcctgtatcagacgataatccagcgtatgaggttttgcaacatgttaaaattcctactcatttaacagatgtagtagtatatgaacaaacgtgggaggaggcgttaactagattaatttttgtgggaagcgattcaaaaggacgtagacaatacttttacggaaaaatgcatgtacagaatcgcaacgctaaaagagatcgtatttttgttagagtatataacgttatgaaacgaattaattgttttataaacaaaaatataaagaaatcgtccacagattccaattatcagttggcggtttttatgttaatggaaactatgttttttattagatttggtaaaatgaaatatcttaaggagaatgaaacagtagggttattaacactaaaaaataaacacatagaaataagtcccgatgaaatagttatcaagtttgtaggaaaggacaaagtttcacatgaatttgttgttcataagtctaatagactatataaaccgctattgaaactgacggatgattctagtcccgaagaatttctgttcaacaaactaagtgaacgaaaggtatacgaatgtatcaaacagtttggtattagaatcaaggatctccgaacgtatggagtcaattatacgtttttatataatttttggacaaatgtaaagtccatatctcctcttccgtcaccaaaaaagttaatagcgttaactatcaaacaaactgctgaagtggtaggtcatactccatcaatttcaaaaagagcttatatggcaacgactattttagaaatggtaaaggataaaaattttttagatgtagtatctaaaactacgttcgatgaattcctatctatagtcgtagatcacgttaaatcatctacggatggatgatatagatctttacacaaataattacaagaccgataaatggaaatggataagcgtatgaaatctctcgcaatgacagctttcttcggagagctaagcacattagatattatggcattgataatgtctatatttaaacgccatccaaacaataccattttttcagtggataaggatggtcagtttatgattgatttcgaatacgataattataaggcttctcaatatttggatctgaccctcactccgatatctggagatgaatgcaagactcacgcatcgagtatagccgaacaattggcgtgtgtggatattattaaagaggatattagcgaatatatcaaaactactccccgtcttaaacgatttataaaaaaataccgcaatagatcagatactcgcatcagtcgagatacagaaaagcttaaaatagctctagctaaaggcatagattacgaatatataaaagacgcttgttaataagtaaatgaaaaaaaactagtcgtttataataaaacacgatatggatgccaacgtagtatcatcttctactattgcgacgtatatagacgctttagcgaagaatgcttcagaattagaacagaggtctaccgcatacgaaataaataatgaattggaactagtatttattaagccgccattgattactttgacaaatgtagtgaatatctctacgattcaggaatcgtttattcgatttaccgttactaataaggaaggtgttaaaattagaactaagattccattatctaaggtacatggtctagatgtaaaaaatgtacagttagtagatgctatagataacatagtttgggaaaagaaatcattagtgacggaaaatcgtcttcacaaagaatgcttgttgagactatcgacagaggaacgtcatatatttttggattacaagaaatatggatcctctatccgactagaattagtcaatcttattcaagcaaaaacaaaaaactttacgatagactttaagctaaaatattttctaggatccggtgcccaatctaaaagttctttgttgcacgctattaatcatccaaagtcaaggcctaatacatctctggaaatagaattcacacctagagacaatgaaacagttccatatgatgaactaataaaggaattgacgactctctcgcgtcatatatttatggcttctccagagaatgtaattctttctccgcctattaacgcgcctataaaaacctttatgttgcctaaacaagatatagtaggtttggatctggaaaatctatatgccgtaactaagactgacggcattcctataactatcagagttacatcaaacgggttgtattgttattttacacatcttggttatattattagatatcctgttaagagaataatagattccgaagtagtagtctttggtgaggcagttaaggataagaactggaccgtatatctcattaagctaatagagcccgtgaatgctatcagtgatagactagaagaaagtaagtatgttgaatctaaactagtggatatttgtgatcggatagtattcaagtcaaagaaatacgaaggtccgtttactacaactagtgaagtcgtcgatatgttatctacatatttaccaaagcaaccagaaggtgttattctgttctattcaaagggacctaaatctaacattgattttaaaattaaaaaggaaaatactatagaccaaactgcaaatgtagtatttaggtacatgtccagtgaaccaattatctttggagaatcgtctatctttgtagagtataagaaatttagcaacgataaaggctttcctaaagaatatggttctggtaagattgtgttatataacggcgttaattatctaaataatatctattgtttggaatatattaatacacataatgaagtgggtattaagtccgtggttgtacctattaagtttatagcagaattcttagttaatggagaaatacttaaacctagaattgataaaaccatgaaatatattaactcagaagattattatggaaatcaacataatatcatagtcgaacatttaagagatcaaagcatcaaaataggagatatctttaacgaggataaactatcggatgtgggacatcaatacgccaataatgataaatttagattaaatccagaagttagttattttacgaataaacgaactagaggaccgttgggaattttatcaaactacgtcaagactcttcttatttctatgtattgttccaaaacatttttagacgattccaacaaacgaaaggtattggcgattgattttggaaacggtgctgacctggaaaaatacttttatggagagattgcgttattggtagcgacggatccggatgctgatgctatagctagaggaaatgaaagatacaacaaattaaactctggaattaaaaccaagtactacaaatttgactacattcaggaaactattcgatccgatacatttgtctctagtgtcagagaagtattctattttggaaagtttaatatcatcgactggcagtttgctatccattattcttttcatccgagacattatgctaccgtcatgaataacttatccgaactaactgcttctggaggcaaggtattaatcactaccatggacggagacaaattatcaaaattaacagataaaaagacttttataattcataagaatttacctagtagcgaaaactatatgtctgtagaaaaaatagctgatgatagaatagtggtatataatccatcaacaatgtctactccaatgactgaatacattatcaaaaagaacgatatagtcagagtgtttaacgaatacggatttgttcttgtagataacgttgatttcgctacaattatagaacgaagtaaaaagtttattaatggcgcatctacaatggaagatagaccgtctacaaaaaactttttcgaactaaatagaggagccattaaatgtgaaggtttagatgtcgaagacttacttagttactatgttgtttatgtcttttctaagcggtaaataataatatggtatgggttctgatatccccgttctaaatgcattaaataattccaatagagcgatttttgttcctataggaccttccaactgtggatactctgtattgttaatagatatattaatacttttgtcgggtaacagaggttctacgtcttctaaaaataaaagttttataacatctggcctgttcataaataaaaacttggcgattctatatatactcttattatcaaatctagccattgtcttatagatgtgagctactgtaggtgtaccatttgattttctttctaatactatatatttctctcgaagaagttcttgcacatcatctgggaataaaatactactgttgagtaaatcagttattttttttatatcgatattgatggacatttttatagttaaggataataagtatcccaaagtcgataacgacgataacgaagtatttatacttttaggaaatcacaatgactttatcagattaaaattaacaaaattaaaggagcatgtatttttttctgaatatattgtgactccagatacatatggatctttatgcgtcgaattaaatgggtctagttttcagcacggtggtagatatatagaggtggaggaatttatagatgctggaagacaagttagatggtgttctacatccaatcatatatctaaagatatacccgaagatatgcacactgataaatttgtcatttatgatatatacacttttgacgctttcaagaataaacgattggtattcgtacaggtacctccgtcgttaggagatgatagtcatttgactaatccgttattgtctccgtattatcgtaattcagtagccagacaaatggtcaataatatgatttttaatcaagattcatttttaaaatatttattagaacatctgattagaagccactatagagtttctaaacatataacaatagttagatacaaggataccgaagaattaaatctaacgagaatatgttataatagagataagtttaaggcgtttgtattcgcttggtttaacggcgtttcggaaaatgaaaaggtactagatacgtataaaaaggtatctaatttgatataatgaattcagtgactgtatcacacgcgccatatactattacttatcacgatgattgggaaccagtaatgagtcaattggtagagttttataacgaagtagccagttggctgctacgagacgagacgtcgcctattcctgataagttctttatacagttgaaacaaccgcttagaaataaacgagtatgtgtgtgcggtatagatccgtatccgaaagatggaactggtgtaccgttcgaatcaccaaattttacaaaaaaatcaattaaggagatagcttcatctatatctagattaaccggagtaattgattataaaggttataaccttaatataatagacggggttataccctggaattattacttaagttgtaaattaggagaaacaaaaagtcacgcgatctactgggataagatttccaagttactgctgcagcatataactaaacacgttagtgttctttattgtttgggtaaaacagatttctcgaatatacgggcaaagttagaatccccggtaactaccatagtcggatatcatccagcggctagagaccgccaattcgagaaagatagatcatttgaaattatcaacgttttactggaattagacaacaaggcacctataaattgggctcaagggtttatttattaatgctttagtgaaattttaacttgtgttctaaatggatgcggctattagaggtaatgatgttatctttgttcttaagactataggtgtcccgtcagcgtgcagacaaaatgaagatccaagatttgtagaagcatttaaatgcgacgagttagaaagatatattgagaataatccagaatgtacactattcgaaagtcttagggatgaggaagcatactctatagtcagaattttcatggatgtagatttagacgcgtgtctagacgaaatagattatttaacggctattcaagattttattatcgaggtgtcaaactgtgtagctagattcgcgtttacagaatgcggtgccattcatgaaaatgtaataaaatccatgagatctaatttttcattgactaagtctacaaatagagataaaacaagttttcatattatctttttagacacgtataccactatggatacattgatagctatgaaacgaacactattagaattaagtagatcatctgaaaatccactaacaagatcgatagacactgccgtatataggagaaaaacaactcttcgggttgtaggtactaggaaaaatccaaattgcgacactattcatgtaatgcaaccaccgcatgataatatagaagattacctattcacttacgtggatatgaacaacaatagttattacttttctctacaacaacgattggaggatttagttcctgataagttatgggaaccagggtttatttcattcgaagacgctataaaaagagtttcaaaaatattcattaattctataataaactttaatgatctcgatgaaaataattttacaacggtaccactggtcatagattacgtaacaccttgtgcattatgtaaaaaacgatcgcataaacatccgcatcaactatcgttggaaaatggtgctattagaatttacaaaactggtaatccacatagttgtaaagttaaaattgttccgttggatggtaataaactgtttaatattgcacaaagaattttagacactaactctgttttattaaccgaacgaggagaccatatagtttggattaataattcatggaaatttaacagcgaagaacccttgataacaaaactaattttgtcaataagacatcaactacctaaggaatattcaagcgaattactctgtccgaggaaacgaaagactgtagaagctaacatacgagacatgttagtagattcagtggagaccgatacctatccggataaacttccgtttaaaaatggtgtattggacctggtagacggaatgttttactctggagatgatgctaaaaaatatacgtgtactgtatcaaccggatttaaatttgacgatacaaagttcgtcgaagacagtccagaaatggaagagttaatgaatatcattaacgatatccaaccattaacggatgaaaataagaaaaatagagagctatatgaaaaaacattatctagttgtttatgcggtgctaccaaaggatgtttaacattcttttttggagaaactgcaactggaaagtcgacaaccaaacgtttgttaaagtctgctatcggtgacctgtttgttgagacgggtcaaacaattttaacagatgtattggataaaggacctaatccatttatcgctaacatgcatttgaaaagatctgtattctgtagcgaactacctgattttgcatgtagtgggtcaaagaaaatcagatctgataatattaaaaagttgacagaaccttgtgtcattggaagaccgtgtttctccaataaaattaataatagaaaccatgcgacaatcattatcgatactaattacaaacctgtttttgataggatagataacgcattaatgagaagaattgccgtcgtgcgattcagaacacacttttctcaaccttctggtagagaggctgctgaaaataatgacgcgtacgataaagtcaaactattagacgaggggttagatggtaaaatacaaaataatagatatagattcgcatttctatacttgttggtgaaatggtacagaaaatatcatgttcctattatgaaactatatcctacacccgaagagattcctgactttgcattctatctcaaaataggtactctgttggtatctagctctgtaaagcatattccattaatgacggacctctccaaaaagggatatatattgtacgataatgtggtcactcttccgttgactactttccaacagaaaatatccaagtattttaattctagactatttggacacgatatagagagcttcatcaatagacataagaaatttgccaatgttagtgatgaatatctgcaatatatattcatagaggatatttcatctccgtaaatatatgctcatatatttatagaagatatcacatatctaaatgaataccggaatcatagatttatttgataatcatgttgatagtataccaactatattacctcatcagttagctactctagattatctagttagaactatcatagatgagaacagaagcgtgttattgttccatattatgggatcaggtaaaacaataatcgctttgttgttcgccttggtagcttccagatttaaaaaggtttacattctagtgccgaacatcaacatcttaaaaattttcaattataatatgggtgtagctatgaacttgtttaatgacgaattcatagctgagaatatctttattcattccacaacaagtttttattctcttaattataacgataacgtcattaattataacggattatctcgctacaataactctatttttatcgttgatgaggcacataatatctttgggaataatactggagaacttatgaccgtgataaaaaataaaaacaagattccttttttactattgtctggatctcccattactaacacacctaatactctgggtcatattatagatttaatgtccgaagagacgatagattttggtgaaattattagtcgtggtaagaaagtaattcagacacttcttaacgaacgcggtgtgaatgtacttaaggatttgcttaaaggaagaatatcatattacgaaatgcctgataaagatctaccaacgataagatatcacggacgtaagtttctagatactagagtagtatattgtcacatgtctaaacttcaagagagagattatatgattactagacgacagctatgttatcatgaaatgtttgataaaaatatgtataacgtgtcaatggcagtattgggacaacttaatctgatgaataatttagatactttatttcaggaacaggataaggaattgtacccaaatctgaaaataaataatggcgtgttatacggagaagaattggtaacgttaaacattagttccaaatttaaatactttattaatcggatacagacactcaacggaaaacattttatatacttttctaattctacatatggcggattggtaattaaatatatcatgctcagtaatggatattctgaatataatggttctcagggaactaatccacatatgataaacggcaaaccaaaaacatttgctatcgttactagtaaaatgaaatcgtctttagaggatctattagatgtgtataattctcctgaaaacgatgatggtagtcaattgatgtttttgttttcatcaaacattatgtccgaatcctatactctaaaagaggtaaggcatatttggtttatgactatcccagatactttttctcaatacaaccaaattcttggacgatctattagaaaattctcttacgccgatatttctgaaccagttaatgtatatcttttagccgccgtatattccgatttcaatgacgaagtgacgtcattaaacgattacacacaggatgaattaattaatgttttaccatttgacatcaaaaagctgttgtatctaaaatttaagacgaaagaaacgaatagaatatactctattcttcaagagatgtctgaaacgtattctcttccaccacatccatcaattgtaaaagttttattgggagaattggtcagacaatttttttataataattctcgtattaagtataacgataccaagttacttaaaatggttacatcagttataaaaaataaagaagacgctaggaattacatagatgatattgtaaacggtcacttctttgtatcgaataaagtatttgataaatctcttttatacaaatacgaaaacgatattattacagtaccgtttagactttcctacgaaccatttgtttggggagttaactttcgtaaagaatataacgtggtatcttctccataaaactgatgagatatataaagaaataaatgtcgagctttgttaccaatggatacctttccgttacattggaacctcatgagctgacgttagacataaaaactaatattaggaatgccgtatataagacgtatctccatagagaaattagtggtaaaatggccaagaaaatagaaattcgtgaagacgtggaattacctctcggcgaaatagttaataattctgtagttataaacgttccgtgtgtaataacctacgcgtattatcacgttggggatatagtcagaggaacattaaacatcgaagatgaatcaaatgtaactattcaatgtggagatttaatctgtaaactaagtagagattcgggtactgtatcatttagcgattcaaagtactgcttttttcgaaatggtaatgcgtatgacaatggcagcgaagtcactgccgttctaatggaggctcaacaaggtatcgaatctagttttgtttttctcgcgaatatcgtcgactcataaaaaagagaatagcggtaagtataaacacgaatactatggcaataattgcgaatgttttattctcttcgatatatttttgataatatgaaaaacatgtctctctcaaatcggacaaccatctcataaaatagttctcgcgcgctggagaggtagttgccgctcgtataatctctccagaataatatacttgcgtgtcgtcgttcaatttatacggatttctatagttctctgttatataatgcggtttgccctcatgattagacgacgacaatagtgttctaaatttagatagttgatcagaatgaatgtttattggcgttggaaaaattatccatacagcgtctgcagagtggttgatagttgttcctagatatgtaaaataatccaacttactaggcagcaaattgtctagataaaatactgaatcaaacggtgcagacgtattggcggatctaatggaatccaattgattaactatcttttgaaaatatacatttttatgatccaatacttgtaagaatatagaaataatgataagtccatcatcgtgtttttttgcctcttcataagaactatattttttcttattccaatgaacaagattaatctctccagagtatttgtacacatctatcaagtgattggatccataatcgtcttcctttccccaatatatatgtagtgatgataacacatattcattggggagaaaccctccacttatatatcctcctttaaaattaatccttactagttttccagtgttctggatagtggttggtttcgactcattataatgtatgtctaacggcttcaatcgcgcgttagaaattgcttttttagtttctatattaataggagatagttgttgcggcatagtaaaaatgaaatgataactgtttaaaaatagctcttagtatgggaattacaatggatgaggaagtgatatttgaaactcctagagaattaatatctattaaacgaataaaagatattccaagatcaaaagacacgcatgtgtttgctgcgtgtataacaagtgacggatatccgttaataggagctagaagaacttcattcgcgttccaggcgatattatctcaacaaaattcagattctatctttagagtatccactaaactattacggtttatgtactacaatgaactaagagaaatctttagacggttgagaaaaggttctatcaacaatatcgatcctcactttgaagagttaatattattgggtggtaaactagataaaaaggaatctattaaagattgtttaagaagagaattaaaagaggaaagtgatgaacgtataacagtaaaagaatttggaaatgtaattctaaaacttacaacacgggataaattatttaataaagtatatataagttattgcatggcgtgttttattaatcaatcgttggaggatttatcgcatactagtatttacaatgtagaaattagaaagattaaatcattaaatgattgtattaacgacgataaatacgaatatctgtcttatatttataatatgctagttaatagtaaatgaacttttacagatctagtataattagtcagattattaagtataatagacgactagctaagtctattatttgcgaggatgactctcaaattattacactcacggcattcgttaaccaatgcctatggtgtcataaacgagtatccgtgtccgctattttattaactactgataacaaaatattagtatgtaacagacgagatagttttctctattctgaaataattagaactagaaacatgtttagaaagaaacgattatttctgaattattccaattatttgaacaaacaggaaagaagtatactatcgtcatttttttctctagatccagctactactgataatgatagaatagacgctatttatccgggtggcatacccaaaaggggtgagaatgttccagagtgtttatccagggaaattaaagaagaagttaatatagacaattcttttgtattcatagacactcggttttttattcatggcatcatagaagataccattattaataaattttttgaggtaatcttctttgtcggaagaatatctctaacgagtgatcaaatcattgatacatttaaaagtaatcatgaaatcaaggatctaatatttttagatccgaattcaggtaatggactccaatacgaaattgcaaaatatgctctagatactgcaaaacttaaatgttacggccatagaggatgttattatgaatcattaaaaaaattaactgaggatgattgattaaaaaatataaattaatttaccatcgtgtatttttataacgggattgtccggcatatcatgtagatagttaccgtctacatcgtatactcgaccatctacgcctttaaatcctctatttattgacattaatctattagaattggaataccaaatattagtaccctcaattagtttattggtaatattttttttagacgatagatcgatggctcttgaaaccaaggttttccaaccggactcattgtcgatcggtgagaagtctttttcattagcatgaatccattctaatgatgtatgtttaaacactctaaacaattggacaaattcttttgatttgctttgaatgatttcaaataggtcttcgtctacagtaggcataccattagataatctagccattataaagtgcacgtttacatatctacgttctggaggagtaagaacgtgactattgagacgaatggctcttcctactatctgacgaagagacgcctcgttccatgtcatatctaaaatgaagatatcattaattgagaaaaaactaataccctcgcctccactagaagagaatacgcatgttttaatgcattctccgttagtgtttgattcttggttaaactcagccaccgccttgattctagtatcttttgttctagatgagaactctatattagagataccaaagactttgaaatatagtaataagatttctattcctgactgattaacaaatggttcaaagactagacatttaccatgggatgctaatattcccaaacatacatctataaatttgacgcttttctcttttaattcagtaaatagagagatatcagccgcactagcatcccctttcaatagttctccctttttaaaggtatctaatgcggatttagaaaactctctatctcttaatgaatttttaaaatcattatatagtgttgctatctcttgcgcgtattcgcccggatcacgattttgtctttcaggaaagctatcgaacgtaaacgtagtagccatacgtctcagaattctaaatgatgatatacctgtttttatttcagcgagtttagccttttgataaatttcttcttgctttttcgacatattaacgtatcgcattaatactgttttcttagcgaatgatgcagacccttctacgtcatcaaaaatagaaaactcgttattaactatatacgaacatagtcctcctagtttggagactaattctttttcatcgactagacgtttattctcaaatagtgattggtgttgtaaggatcctggtcgtagtaagttaaccaacatggtgaattcttgcacactattgacgataggtgtagccgataaacaaatcatcttatggttttttaacgcaatggtcttagataaaaaattatatactgaacgagtaggacggatcttaccatcttctttgattaatgatttagaaatgaagttatgacattcatcaatgatgacgcatattctactcttggaattaatagttttgatattagtaaaaaatttatttctaaaattttgatcatcgtaattaataaaaatacaatccttcgttatctctggagcgtatctgagtatagtgttcatccaaggatcttctatcaaagcctttttcaccaataagataatagcccaattcgtataaatatccttaagatgtttgagaatatatacagtagtcattgttttaccgacacccgtttcatggaacaataaaagagaatgcatactgtctaatcctaagaaaactcttgctacaaaatgttgataatccttgaggcgtactacgtccgaccccatcatttcaacgggcatattagtagttctgcgtaaggcataatcgatataggccgcgtgtgatttactcatttatgagtgataagtaataactatgttttaaaaatcacagcagtagtttaactagtcttctctgatgtttgttttcgatactttttgaatcagaagtcatactagaataaagcaacgagtgaacgtaatagagagcttcgtatactctattcgaaaactctaagaacttattaatgaattccgtatccactggattgtttaaaatactaaattgaacactgttcacatccttccaagaagaagacttagtgacggacttaacatgagacataaataaatccaaattttttttacaaacatcactagccaccataatggcgctatctttcaaccagctatcgcttacgcattttagcagtctaacatttttaaagagactacaatatattctcatagtatcgattacacctctaccgaataaagttggaagtttaataatacaatatttttcgtttacaaaatcaaataatggtcgaaacacgtcgaaggttaacatcttataatcgctaatgtatagattgttttcagtgagatgattattagatttaatagcatctcgttcacgtttgaacagtttattgcgtgcgctgaggtcggcaactacggcgtccgctttagtactcctcccataatactttacgctattaatctttaaaatttcatagactttatctagatcgctttctggtaacatgatatcatgtgtaaaaagttttaacatgtcggtcggcattctatttagatcattaactctagaaatctgaagaaagtaattagctccgtattccagactaggtaatgggcttttacctagagacagattaagttctggcaatgtttcataaaatggaagaaggacatgcgttccctcccggatattttttacaatttcatccatttacaactctatagtttgttttcattattattagttattatctcccataatcttggtaatacttaccccttgatcgtaagataccttatacaggtcattacatacaactaccaattgtttttgtacataatagattggatggttgacatccatggtggaataaactactcgaacagatagtttatctttccccctagatacattagccgtaatagttgtcggcctaaagaatatctttggtgtaaagttaaaagttagggttcttgttccattattgctttttgtcagtagttcattataaattctcgagatgggtccgttctctgaatatagaacatcatttccaaatctaacttctagtctagaaataatatcggtcttattcttaaaatctattcccttgatgaagggatcgttaatgaacaaatccttggcctttgattcggctgatctattatctccgttatagacgttacgttgactagtccaaagacttacaggaatagatgtatcgatgatgttgatactatgtgatatgtgagcaaagattgttctcttagtggcatcactatatgttccagtaatggcggaaaactttttagaaatgttatatataaaagaattttttcgtgttccaaacattagcagattagtatgaagataaacactcatattatcaggaacattatcaatttttacatacacatcagcatcttgaatagaaacgataccatcttctggaacctctacgatctcggcagactccggataaccagtcggtgggccatcgctaacaataactagatcatccaacaatctactcacatatgcatctatataatctttttcatcttgtgagtaccctggatacgaaataaatttattatccgtatttccataataaggtttagtataaacagagagagatgttgccgcatgaacttcagttacagtcgccgttggttggtttatttgacctattactctcctaggtttctctataaacgatggtttaatttgtacattcttaaccatatatccaataaagctcaattcaggaacataaacaaattctttgttgaacgtttcaaagtcgaacgaagagtcacgaataacgatatcggatactggattgaaggttaccgttacggtaatttttgaatcggatagtttaagactgctgaatgtatcttccacatcaaacggagttttaatataaacgtatactgtagatggttctttaatagtgtcattaggagttaggccaatagaaatatcattaagttcactagaatatccagagtgtttcaaagcaattgtattattgatacaattattatataattcttcgccctcaatttcccaaataacaccgttacacgaagagatagatacgtgattaatacatttatatccaacatatggtacgtaactgaatcttcccatacctttaacttctggaagttccaaactcagaaccaaatgattaagcgcagtaatatactgatccctaatttcgaagctagcgatagcctgattgtctggaccatcgtttgtcataactccggatagagaaatatattgcggcatatataaagttggaatttgactatcgactgcgaagacattagaccgtttaatagagtcatccccaccgatcaaagaattaatgatagtattattcattttctatttaaaatggaaaaagcttacaataaactccgtagagaaatatctataatttgtgagttttccttaaagtaacagcttccgtaaacgccgtctttatctcttagtaggtttattgtatttatgaccttttccttatcttcatagaatactaaaggcaacaaagaaatttttggttcttctctaagagctacgtgagacttaaccatagaagccaacgaatccctacatattttagaacagaaataccctacttcaccacccttgtatgtctcaatactaataggtctaaaaaccaaatcttgattacaaaaccaacacttatcaattacactatttgtcttaatagacacatctgccatagatttataatactttggtagtatacaagcgagtgcttcttctttagcgggcttaaagactgctttaggtgctgaaataaccacatctggaaggcttactcgcttagccatttaattacggaactatttttttatacttctaatgagcaagtagaaaacctctcatctacaaaaacgtactcgtgtccataatcctctaccatagttacacgttttttagatctcatatgtgctaaaaagttttcccatactaattggttactattatttttcgtataatttttaacagtttgaggttttagatttttagttacagaagtgatatcgaatattttatccaaaaagaatgaataattaattgtcttagaaggagtgttttcttggcaaaagaataccaagtgcttaaatatttctactacttcattaatcttttctgtactcagattcagtttctcatcttttacttgattgattatttcaaagactaacttataatcctttttatttattctctcgttagccttaagaaaactagatacaaaatttgcatctacatcatccgtggatatttgatttttttccatgatatccaagagttccgagataatttctccagaacattgatgagacaataatctccgcaatacatttctcaaatgaataagtttattagacacgtggaagtttgactttttttgtacctttgtacatttttgaaataccgactcgcaaaaaatacaatattcatatccttgttcagatactataccgttatgtctacaaccgctacataatcgtagattcatgttaacactctacgtatctcgtcgtccaatattttatataaaaacattttatttctagacgttgccagaaaatcctgtaatatttttagttttttgggctgtgaataaagtatcgccctaatattgttaccgtcttccgccaatatagtagttaaattatccgcacatgcagaagaacaccgcttaggcggattcagtacaatgttatatttttcgtaccaactcatttaaatatcataatctaaaatagttctgtaatatgtctagcgctaatatattgatcataatcctgtgcataaattaagatacaacaatgtctcgaaatcatcgacatggcttcttccatagttagaagatcgtcgtcaaagttagcaacgtgattcatcaacatttgctgttttgaggcagcaaatactgaaccgtcgccattcaaccattcataaaaaccatcgtctgaatccattgataatttcttgtactggtttttgagagctcgcatcaatctagcatttctagctcccggattgaaaacagaaagaggatcgtacatccagggtccattttctgtaaatagaatcgtataatgtcccttcaagaagatatcagacgatccacaatcaaagaattggtctccgagtttgtaacaaactgcggactttaacctatacatgataccgtttagcataatttctggtgatacgtcaatcggagtatcatctattagagatctaaagccggtgtaacattctccaccaaacatattcttattctgacgtcgttctacataaaacatcattgctccattaacgataacaggggaatgaacagcactacccatcacattagttcccaatggatcaatgtgtgtaactccagaacatcttccatagcctatgttaggaggagcgaacaccactcttccactattgccatcgaatgccatagaataaatatccttggaattgatagaaatcggactgtcggatgttgtgatcatcttcataggattaacaactatgtatggtgccgcctgaagtttcatatcgtaactgatgccgtttataggtctagccacagaaaccaacgtaggtctaaatccaactatagacaaaatagaagccaatatctgttcctcatctgtcataacttgagagcatccagtatgaataatcttcattagatggggatctaccgcatcatcatcgttacaataaaaaattcccattctaatgttcataattgcttttctaatcatggtatgcatgtttgctctctgaatctctgtggaaattagatctgatacacctgtaatcactatcggattatcctccgtaagacgattaaccaacaacatataattataagactttacttttctaaattcataaagttgctggattaggctataggtgtctccatgtacatacgcgttctcgagcgcaggaagtttaataccgaatagtgccatcagaataggatgaatatagtaattagtttctggttttctataaataaaagacaaatcttgtgaactagacatatcggtaaaatgcatggattggaatcgtgtagtcgacagaagaatatgatgattagatggagagtatattttatctaactctttgagttggtcaccgattctaggactagctcgagaatgaataagtactaaaggatgagtacatttcacagaaacactagcattgttcaatgtgctctttacatgggtaaggagttgaaatagctcgtttctatttgttctgacaatatttagtttattcataatgttaagcatatcctgaatagtaaagttagatgtgtcatacttgttagtagttagatatttagcaattgcattcccatcatttctcaatctcgtactccaatcatgtgtagatgctacttcgtcgatggaaaccatacaatcctttttgataggctgttgagattgatcatttcctgcacgtttaggtttggtacgttgatttctagcccctgcggatataaagtcatcgtctacaatttgggacaatgaattgcatacactacaagacaaagatttatcagaagtgtgaatatgatcttcatctaccaaagaaagagtttgattagtataactagattttagtcctgcgttagatgttaaaaaaacatcgctattgaccacggcttccattatttatattcgtagtttttactcgaaagcgtgattttaatatccaatcttattacttttggaatcgttcaaaacctttgactagttgtagaatttgatctattgccctacgcgtatactcccttgcatcatatacgttcgtcaccagatcgtttgtttcggcctgaagttggtgcatatctctttcaacattcgacatgagatccttaagggccatatcgtctagattttgttgagatgctgctcctggatttggattttgttgtgctgttgtacatactgtaccaccagtaggtgtaggagtacatacagtggccacaataggaggttgagaaagtgtaaccgttggagtagtacaagaaatacttccatccgattgttgtgtacatgtagttgttggtaacgtctgagaaggttgggtagatggcggcgtcgtcgttttttgatctttattaaatttagagataatatcctgaacagcattgctcggcgtcaacgctggaaggagtgaactcgccggcgcatcagtatcttcagacagccaatcaaaaagattagacatatcagatgatgtattagtttgttgtcgtggttttggtgtaggagcagtactactaggtagaagaataggagccgatgtagctgttggaaccggctgtggagttatatgaatagttggttgtagcggttggataggctgtctgctggcggccatcatattatctctagctagttgttctcgcaactgtctttgataatacgactcttgagactttagtcctatttcaatcgcttcatcctttttcgtatccggatccttttcttcagaataatagattgacgactttggtgtagaggattctgccagcctctgtgagaacttgttaaagaagtccatttaaggctttaaaattgaattgcgattataagattaaatggcagacacagacgatattatcgactatgaatccgatgatctcaccgaatacgaggatgatgaagaagaggaagaagatggagagtcactagaaactagtgatatagatcccaaatcttcttataagattgtagaatcagcatccactcatatagaagatgcgcattccaatcttaaacatatagggaatcatatatctgctcttaaacgacgctatactagacgtataagtctatttgaaatagcgggtataatagcagaaagctataacttgcttcaacgaggaagattacctctagtttcagaattttctgacgaaacgatgaagcaaaatatgctacatgtaattatacaagagatagaggagggttcttgtcctatagtcatcgaaaagaacggagaattgttgtcggtaaacgattttgacaaagatggtctaaaattccatctagactatattatcaaaatttggaaacttcaaaaacgatattagaatttatacgaatatcgttctctaaatgtcacaatcaagtctcgcatgttcagcaatttattgtcgtactttatatcgtgttcattaacgatatcttgcaaaatagtaatgattctatcttccttcgatagatattcttcagagattattgtcttatattctttcttgttatcagatatgaatttgataagactttgaacattattgatacccgtctgtttaattttttctacagatattttagttttggcagattctatcgtatctgtcaatagacatccaacatcgacattcgacgtcaattgtctataaatcaacgtataaattttagaaataacattagcgaattgttgtgcgttgatgtcgttattctgaaacagtatgattttaggtagcattttcttaacaaagagaacgtatttattgttactcagttgaacagatgatatatccagattactaacgcatctgattccgtataccaaactttcagaagaaatggtatacaattgtttgtattcattcaatgtctctttttcagaaattagtttagagtcgaatactgcaataattttcaagagatagttttcatcagataagattttatttagtgtagatatgataaaactattgttttgttggagaacttgatacgccgcgttctctgtagtcgacgctctcaaatgggaaacaatctccattatttttttggaatcggatactatatcttcggtatcttgacgcagtctagtatacatagagttaagagagattagagtttgtacattaagcaacatgtctctaaatgtggctacaaacttttcctttttcacatcatctagtttattatataccgatttcacaacggcaccagatttaaggaaccagaatgaaaaactctgataactacaatatttcatcatagttacgattttatcatcttctatagttggtgtaatagcgcatacctttttctccaagactggaaccaacgtcataaaaatgtttaaatcaaaatccatatcaacatctgatgcgctaagaccagtctcgcgttcaagattatctttactaatggtgacgaactcatcgtataaaactctaagtttgtccattatttatttacagatttagttgtttaatttatttgtgctcttccagagttgggatagtatttttctaacgtcggtattatattattaggatctacgttcatatgtatcataatattaatcatccacgttttgataaatctatctttagcttctgaaataacgtatttaaacaaaggagaaaaatatttagctacggcatcagacgcaataacattttttgtaaatgtaacgtatttagacgacagatcttcgttaaaaagttttccatctatgtagaatccatcggttgttaacaccattcccgcgtcagattgaataggagtttgaatagtttgttttggaaatagatccttcaataacttatagttgggtgggaaaaaatcgattttatcactagactctttcttttttactatcattacctcatgaactatttcttgaatgagtatatgtattttctttcctatatcggacgcgttcattggaaaatataccatgtcgttaactataagaatatttttatcctcgtttacaaactgaataatatcagatgtagttcgtaaacgaactatatcatcaccagcacaacatctaactatatgatatccactagtttcctttagccgtttattatcttgttccatattagcagtcattccatcatttaagaaggcgtcaaagataatagggagaaatgacattttggattctgttacgactttaccaaaattaaggatatacggacttactatctttttctcaacgtcaatttgatgaacacacgatgaaaatgtgcttctatgagattgatcatgtagaaaacaacaagggatacaatatttccgcatatcatgaaatatattaagaaatcccaccttattatatttccccaaaggatccatgcacgtaaacattatgccgttatcattaataaagacttctttctcatcggatctgtaaaagttgttactgatttttttcattccaggatctagataattaataatgatgggttttctattcttattctttgtattttggcatatcctagaccagtaaacagtttccactttggtaaaatcagcagacttttgaacgctattaaacatggcattaatggcaataactaaaaatgtaaaatatttttctatgttaggaatatggtttttcactttaatagatatatggtttttggccaaaatgatagatatttttttatccgaggatagtaaaatattattagtcgccgtctctataaaaatgaagctagtctcgatatccaattttattctagaattgataggagtcgccaaatgtaccttatacgttatatctcccttgatgcgttccatttgtgtatctatatcggacacaagatctgtaaatagttttacgttattaatcatcacggtatcgccgtcgctagataacgctaatgtaccatccaagtcccaaatggagagatttaactgttcatcgtttagaataaaatgattaccggtcatattaataaagtgttcatcgtatctagataacaacgacttataattaatgtccaagtcttgaactcgctgaatgatcttttttaacccagttagttttagattggtacgaaatatattgttaaactttgattctacagtaatgtccaaatctagttgtggaaatacttccatcaacattgtttcaaacttgataatattattatctacatcttcgtacgatccaaattccggaatagatgtatcgcacgctctggccacccagataaccaaaaagtcacacgctccaggatatacattgtataaaaagctatcgttttttagtagggtttttttctgcgtgtatacgaagggattaaaaatagtattatcaacgtaactatattccaaattattcttatgagaatagataataatatcgtccttaatatctaacaaatttcctaaatatccctttaattgagtcattcgaagcgtcaatagaatatgtctcttaactatttccggctgttgtatatttaaatgacttcgtaaaaaataatatatgggcgacttctcatctatgtaatcatatggagtgagatatagggctcgttctacctcctgccccttacccacctgtaataccaattgcggacttactatatatcgcatatttatatcgtggggtaaagtgaaaatctactaccgatgatgtaagtcttacaatgttcgaaccagtaccagatcttaatttggaggcctccgtagaactaggggaggtaaatatagatcaaacaacacctatgataaaggagaatagcggttttatatcccgcagtagacgtctattcgcccatagatctaaggatgatgagagaaaactagcactacgattctttttacaaagactttattttttagatcatagagagattcattatttgttcagatgcgttgacgctgtaaaagacgtcactattaccaaaaaaaataacattatcgtggcgccttatatagcacttttaactatcgcatcaaaaggatgcaaacttacagaaacaatgattgaagcattctttccagaactatataatgaacatagtaagaaatttaaattcaactctcaagtatccatcatccaagaaaaactcggataccagtttggaaactatcacgtttatgattttgaaccgtattactctacagtagctctggctattcgagatgaacattcatctggcatttttaatatccgtcaagagagttatctggtaagttcattatctgaaataacatatagattttatctaattaatctaaaatctgatcttgttcaatggagtgctagtacgggcgctgtaattaatcaaatggtaaatactgtattgattacagtgtatgaaaagttacaactggtcatagaaaatgattcacaatttacatgttcattggctgtggaatcaaaacttccaataaaattacttaaagatagaaatgaattatttacaaaattcattaacgagttaaaaaagaccagttcattcaagataagcaaacgcgataaggatacgctactaaaatattttacttaggactggagttagaatttatagacgactcatttcgtttatcattgttactattattactattactatcattattagtgttggcattattagtattcttcttgtcatcttgttcagaaatatacagcaatgctatacctaatactaaatacattatcatgctcgcaatggctctaacaacaacgaaccaaaatgaatttggtcgtagcttttgttcacaaaaatacataaagaaatgtctacataaatctatggcgccattggctacttgaaatagcgccagtcctcctacagattttaatatagctgtataacatgacatttattcatcatcaaaagagacagagtcaccatctgtcatatttagattttttttcatgtgttcaaagtatcctctactcatttcattataatagtttatcatacttagaattttaggacggatcaatgagtaagacttgactagatcgtcagtagtaatttgtgcatcgtctattctgcatccgcttcgtcgaataatgtatagcatcgctttgagattctccatagctatcaagtctttatacaatgacatggaaatatctgtgaatactttatacttctccaacatcgatgccttaacatcatcgcctactttagcattgaaaatacgttctattgtgtagatggatgtagcaagatttttaaacaacaatgccatcttacacgatgattgcctcaagtctccaatcgtttgtttagaacgattagctacagagtccaatgcttggctgactagcatattattatctttagaaattgtattcttcaatgaggcgtttatcatatctgtgatttcgttagtcatattacagtctgactgggttgtaatgttatccaacatatcacctatggatacggtacacgtaccagcatttgtaataatcctatctaagatgttgtatggcattgcgcagaaaatatcttctcctgtaatatctccactctcgataaatctactcagattattcttaaatgccttattctctggagaaaagatatcagtgtccatcatttcattaatagtatacgcagaaaagataccacgagtatcaattctatccaagatacttatcggttccgagtcacagataatggtttcctctccttcgggagatcctgcatagaaatatctaggacaatagtttctatactgtctgtaactctgataatctctaaagtcactaactgataccatgaaattgagaagatcaaacgctgaagtaattaatttttctgcctcgtttttactacaactagttttcatcaatgtagtgacgatgtattgtttagttacttttggtctaatactgatgatagagatattattgcttcccataatggatcttctagtagtcaccttaaagcccattgatgcgaatagcagatagataaagtcttggtatgactcctttctaatatagtacggactacctttgtcacccaactttatacccacataagccataacaacctctttaatagccgtttcatgaggtttatcagccatgagcctgagtagttggaagaatctcatgaatcccgtctcagaaagtcctatatgcatgatagatttatctttcctgggaaactctcgtatagtcatagatgaaatactctttaaagtttctgaaataagattagtaacagtcttacctccgactactctaggtaacaaacaaactctaataggtgttttctctgcggagataatatcagaaaggatagagcaataagtagtattattgtgattataaagaccgaatacataacaggtagaatttataaacatcatgtcctgaaggtttttagacttgtattcctcgtaatccataccgtcccaaaacatggatttggtaactttgatagccgtagatctttgttccttcgccaacaggttaaagaaattaataaagaatttgttgtttctatttatgtccacaaattgcacgtttggaagcgccacggttacattcactgcagcattttgaggatcgcgagtatgaagtacgatgttattgtttactggtatatctggaaagaaatctaccagtctaggaataagagattgatatcgcatagaaatagtaaagtttataatctcatcatcgaagagcattttgttaccattgtaataaatatccactctgtcatatgtataaatgaagtactgttcaaacatgatgagatgtttatatgttggcatagtagtgagatcgacgtttggtaatggcaatgtattaagattaactccataatgtctagcagcatctgcgatgttataagcgtcgtcaaagcggggtcgatcttgtattgttatatattgtctaacacctataagattatcaaaatcttgtctgcttaatacaccgttaacaatttttgccttgaattcttttattggtgcattaataacatccttatagaggatgttaaacaaataagtgttatcaaagttaagatctggatatttcttttctgctagaacatccattgagtcggagccatctggtttaatataaccaccgataaatctagctctgtattctgtatccgtcaatctaatattaagaaggtgttgagtgaaaggtggaagatcgtaaaagctgtgagtattaatgataggattagtttccgaactaatgttaattggggtattaataatatctatatttccagcgttaagtgtaacattaaacagttttaattcacgtgacgtggtatcaattaaataattaatgcccaatttggatatagcagcctgaagctcatcttgtttagttacggatcctaatgagttattaagcaatatatcgaacggatgaacgaaggttgttttaagttggtcacatactttgtaatctagacatagatgcggaagaacggtagaaactatacgaaataaatattcagagtcctctaattgatcaagagtaactattgacttaataggcatcatttatttagtattaaatgacgaccgtaccagtgacggatatacaaaacgatttaattacagagttttcagaagataattatccatctaacaaaaattatgaaataactcttcgtcaaatgtctattctaactcacgttaacaacgtggtagatagagaacataatgccgccgtagtgtcatctccagaggaaatatcctcacaacttaatgaagatctatttccagatgatgattcaccggccactattatcgaacgagtacaacctcatactactattattgacgatactccacctcctacgtttcgtagagagttattaatatcggaacaacgtcaacaacgagaaaaaagatttaatattacagtatcgaaaaatgctgaagcaataatggaatctagatctatgataacttctatgccaacacaaacaccatccttgggagtagtttatgataaagataaaagaattcagatgttagaggatgaagtggttaatcttagaaatcaacgatctaatacaaaatcatctgataatttagataattttaccaaaatactatttggtaagactccgtacaaatcaacagaagttaataagcgtatagccatcgttaattatgcaaatttgaacgggtcccccttatcagtcgaggacttggatgtttgttcggaggatgaaatagatagaatctataaaacgattaaacaatatcacgaaagtagaaaacgaaaaattatcgtcactaacgtgattattattgtcataaacattatcgagcaggcattgctaaaactcggatttgaagaaatcaaaggactgagtaccgatatcacttcagaaattatcgatgtggagatcggagatgactgcgatgctgtagcatctaaactaggaatcggtaacagtccggttcttaatattgtattgtttatactcaagatattcgttaaacgaattaaaattatttaatttaatacattcccatatccagacaacaatcgtctggattaatctgttcctgtcgtctcataccggacgacatattaatctttttattagtgggcatctttttagatggtttctttttcccagcattaactgagtcgatacctagaagatcgtgattgatctctccgaccattccacgaacttctaattggccgtctctgacggtaccataaactattttaccagcattagtaacagcttggacaatctgaccatccatcgcattgtacgatgtagtagtaactgttgttctacgtctaggagcaccagaagtatttttggagcccttggatgttgatgtagaagaagacgaggattttgattttggtttacatgtaatacattttgaactctttgattttgtatcacatgcgccggcagtcacatctgtttgagaattaagattattgttgcctcctttgacggctgcatctccaccgatttgcgctagtagatttttaagctgtggtgtaatcttattaactgtttcgatataatcatcgtaactgcttctaacggctaaattttttttatccgccatttagaagctaaaaatatttttatttatgcagaagatttaactagattatacaatgaactaatatgatccttttccagattatttacaaacttggtattttttggttctggaggaggcgaatttaaattcggacttggattcggattttgtaagttcttgatcttattatacatcgagtataggatggcgacagtaactgctacacaaataccgatcaaaagaagaataccaatcatttattgacaataacttcactattgatcaagtatgcaatatatcatcttttcactaaataagtagtaataatgattcaacaatgtcgagatatatggacgataataatttagttcatggaaatatcgctatgattggtgtgaatgactccgctaactctgtggggtgcgcagtgctttccccacatagaataaattagcattccgactgtgataataataccaagtataaacgccataatactcaatactttccatgtacgagtgggactggtagacttactaaagtcaataaaggcgaagatacacgaaagaatcaaaagaatgattccagcgattagcacgccggaaaaataatttccaatcataagcatcatgtccatttaactaataaaaattttaaatcgccgaatgaacaaagtggaatataaaccatataaaaacaatagtttgtactgcaaaaataatatctatttttgttttcgaagatatggtaaaattaaatagtagtacacagcatgttataactaacagcagcaacggctcgtaattacttatcatttactagacgaaaaggtggtgggatattttcttgctcaaataatacgaatatatcacccatccattttatgcgatgtttatatactctaatctttaatagatctatagacgacgggtttaccaacaatatagattttatcgattcatctaatttaaacccttccttaaacgtgaatgatctattatctggcataacgatgaccctacctgatgaatcggacaatgtactgggccatgtagaataaattatcaacgaattatcgtctacgaacatttatatcatttgttttaattttaggacgcgaataaatggatataaaatagaaaataacagatattacaaccagtgttatggccgcgcccaaccaggtaggcagttttattttatcttttactacaggttctcctggatgtacgtcaccaacggcggacgtagttctagtacaattagacgtaagttccgcttgggaattttttaacgctaaagagttaacgttaatcgtgcacccaacgtatttacatctagttcgttgaacatcttgattataatataaccattttctatctctagattcgtcagtgcactcatgtaaccaacataccctaggtcctaaatatttatctccggaattagattttggataattcgcgcaccaacaatttctatttcctttatgatcgttacaaaagacgtataatgccgtatccccaaaagtaaaataatcaggacgaataattctaataaactcagaacaatatctcgcatccatatgtttggagcaaatatcggaataagtagacatagccggtttccgttttgcacgtaaccattctaaacaattggggtttccaggatcgtttctacaaaatccagtcatgaaatcgtcacaatgttctgtcttgtaattattattaaatatttttggacagtgtttggtatttgtcttagaacaacattttgccacgctatcactatcgcccaggagataatccttttttataaaatgacatcgttgcccggatgctatataatcagtagcgtgttttaaatccttaatatattcaggagttacctcgttctgataatagattaatgatccaggacgaaatttgaaagaactacatggttctccatgaattaatacatattgtttagcaaattcaggaactataaaactactacaatgatctatcgacataccatctatcaaacaaaacttgggtttaatttctcccggagatgtttcataatagtacgtataactttcttctgcaaacttaacagctctattatattcaggataattaaaacctaattccatatatttgtctcgtatatctgctattcctggtgctattttgattctattaagagtaacagctgcccccattcttaataatcgtcagtatttaaactgttaaatgttggtatatcaacatctaccttatttcccgcagtataaggtttgttgcaggtatactgttcaggaatggttacatttatacttcttctatagtcctgtctttcgatgttcatcacatatgcaaagaacagaataaacaaaataatgtaagaaataatattaaatatctgtgaattcgtaaatacattgattgccataataattacagcagctacaatacacacaatagacattcccacagtgttgccattacctccacgatacatttgagttactaagcaataggtaataactaagctagtaagaggcaatagaaaagatgagataaatatcatcaatatagagattagaggagggctatatagagccaagacgaacaaaatcaaaccgagtaacgttctaacatcattatttttgaagattcccaaataatcattcattcctccataatcgttttgcatcatacctccatctttaggcataaacgattgctgctgttcctctgtaaataaatctttatcaagcactccagcacccgcagagaagtcgtcaagcatattgtaatatcttaaataactcatttatatattaaaaaatgtcactattaaagatggagtataatctttatgccgaactaaaaaaaatgacttgtggtcaacccctaagtctttttaacgaagacggggatttcgtagaagttgaaccgggatcatcctttaagtttctgatacctaagggattttacgcctctccttccgtaaagacgagtctagtattcgagacattaacaacgaccgataataaaatcactagtatcaatccaacaaatgcgccaaagttatatcctcttcaacgcaaagtcgtatctgaagtagtttctaatatgaggaaaatgatcgaatcaaaacgtcctctatacattactcttcacttggcgtgtggatttggtaagactattaccacgtgttatcttatggctacacacggtagaaaaaccgtcatttgcgtacccaataaaatgttaatacatcaatggaagacacaggtagaggcagtcggattggaacataagatatccatagatggagtaagtagtctattaaaggaactaaagactcaaagtccggatgtattaatagtagtcagtagacatctgacaaacgatgccttttgtaaatatatcaataagcattatgatttgttcatcttggatgaatcacatacgtataatctgatgaacaatacagcagttacaagatttttagcgtattatcctccgatgatgtgttattttttaactgctacacctagaccatctaaccgaatttattgtaacagtattattaatattgccaagttatccaatctaaaaaaaactatctatgcagtagatagtttttttgagccatattccacagataatattagacatatggtaaaacgactagatggaccatctaataaatatcatatatataccgagaagttattatctgtagacgagcctagaaatcaacttattcttgataccctggtagaagaattcaagtcaggaactattaatcgcattttagttattactaaactacgtgaacatatggtattattctacaaacgattattagattttttcggaccagaggttgtatttataggagacgcccaaaatagacgtactccagatatggtcaaatcaatcaaggaactaaatagatttatattcgtatccaccttattttattccggtactggtttagatattcctagtttggattcgttgttcatttgctcggcagtaatcaacaatatgcaaatagagcaattactagggagggtatgtcgagaaacagaactattagataggacggtatatgtatttcctaacacatccatcaaagaaataaagtacatgataggaaatttcatgcaacgaattattagtctgtctgtagataaactaggatttaaacaaaaaagttatcggaaacatcaagaatccgatcccacttctgcatgtacaacatcatccagagaagaacgtgtattaaatagaatatttaactcgcaaaatcgttaagaagtttaagcgacgatccgcatgctgcgcaggccagtgtattacccctcatagtattaatataatccaatgatacttttgtgatgtcggaaatcttaaccaatttagactgacaggcagaacacgtcatgcaatcatcatcgtcatcgataactgtagtcttgggcttctttttgcgactcttcattccggaacgcacattggtgctatccatttaggtagtaaaaaataagtcagaatatgccctataacacgatcgtgcaaaacctggtatatcgtctctatctttatcacaatatagtgtatcgacatttttattattattgacctcgtttatcttggaacatggaatgggaacatttttgttatcaacggccatctttgccttaattccagatgttgtaaaattataactaaacagtctatcatcgacacaaatgaaattcttgtttagacgtttgtagtttacgtatgcggctcgttcgcgtctcattttttcagatattgcaggtactataatattaaaaataagaatgaaataacataggattaaaaataaagttatcatgacttctagcgctgatttaactaacttaaaagaattacttagtctgtacaaaagtttgagattttcagattctgcggctatagaaaagtataattctttggtagaatggggaacatctacttactggaaaataggcgtgcaaaaggtagctaatgtcgagacgtcaatatctgattattatgatgaggtaaaaaataaaccgtttaatattgatccgggctattacattttcttaccggtatattttgggagcgtctttatttattcgaagggtaaaaatatggtagaacttggatctggaaactcttttcaaataccagatgatatgcgaagtgcgtgtaacaaagtattagacagcgataacggaatagactttctgagatttgttttgttaaacaatagatggataatggaagatgctatatcaaaatatcagtctccagttaatatatttaaactagctagtgagtacggattaaacatacccaaatatttagaaattgaaatagaggaagacacattatttgacgacgagttatactctattatagaacgctctttcgatgataaatttccaaaaatatccatatcgtatattaagttgggagaacttagacggcaagttgtagactttttcaaattctcattcatgtatattgagtccatcaaggtagatcgtataggagataatatttttattcctagcgttataacaaaatcaggaaaaaagatattagtaaaagatgtagaccatttaatacgatccaaggttagagaacatacatttgtaaaagtaaaaaagaaaaacacattttccattttatacgactatgatggaaacggaacagaaactagaggagaagtaataaaacgaattatagacactataggacgagactattatgttaacggaaagtatttctctaaggttggtagtgcaggcttaaagcaattgactaataaattagatattaatgagtgcgcaactgtcgatgagttagttgatgagattaataaatccggaactgtaaaacgaaaaataaaaaaccaatcagcatttgatttaagcagagaatgtttgggatatccagaagcggattttataacgttagttaataacatgcggttcaaaatagaaaattgtaaggttgtaaatttcaatattgaaaatactaattgtttaaataacccgagtattgaaactatatatggaaactttaaccagttcgtctcaatctttaatgtcgtcaccgatgtcaaaaaaagattattcgagtgaaataatatgcgcctttgatataggtgcaaaaaatcctgccagaactgttttagaagtcaaggataactccgttagggtattggatatatcaaaattagactggagttctgattgggaaaggcgcatagctaaagatttgtcacaatatgaatacactacagttcttctagaacgtcagcctagaaggtcgccgtatgttaaatttatctattttattaaaggctttttatatcatacatcggctgccaaagttatttgcgtctcgcctgtcatgtctggtaattcatatagagatcgaaaaaagagatcggtcgaagcatttcttgattggatggacacattcggattgcgagactccgttccggatagacgcaaattagacgatgtagcggatagtttcaatttggctatgagatacgtattagataaatggaatactaattatacaccttataataggtgtaaatctagaaattacataaaaaaaatgtaataacgttagtaacgccattatggataatctatttacctttctacatgaaatagaagatagatatgccagaactatttttaactttcatctaataagttgcgatgaaataggagatatatatggtcttatgaaagaacgcatttcctcagaggatatgtttgataatatagtgtataataaagatatacatcctgccattaagaaactagtgtattgcgacatccaacttactaaacacattattaatcagaatacgtatccggtatttaacgattcttcacaagtgaaatgttgtcattatttcgacataaactcagataatagcaatattagctctcgtacagtagagatatttgagagggaaaagtcatctcttgtatcatatattaaaactaccaataagaagagaaaggtcaattacggcgaaataaagaaaactgttcatggaggcactaatgcaaattacttttccggtaaaaagtctgacgagtatctgagtactacagttagatccaacattaatcaaccttggatcaaaaccatctctaagaggatgagagttgatatcattaatcactctatagtaacgcgtggaaaaagctctatattacaaactatagaaattatttttactaatagaacatgtgtgaaaatattcaaggattctactatgcacattattctatccaaggacaaggatgaaaaggggtgtatacacatgattgacaaattattctatgtctattataatttatttctgttgttcgaagatatcatccaaaacgagtactttaaagaagtagctaatgttgtaaaccacgtactcacggctacggcattagatgagaaattattcctaattaagaaaatggctgaacacgatgtttatggagttagcaatttcaaaatagggatgtttaacctgacatttattaagtcgttggatcataccgttttcccctctctgttagatgaggatagcaaaataaagttttttaaggggaaaaagctcaatattgtagcattacgatctctggaggattgtataaattacgtgactaaatccgagaatatgatagaaatgatgaaggaaagatcgactattttaaatagcatagatatagaaacggaatcggtagatcgtctaaaagaattgcttctaaaatgaaaaaaaacactaattcagaaatggatcaacgactagggtataagtttttggtgcctgatcctaaagccggagttttttatagaccgttacatttccaatatgtatcgtattctaattttatattgcatcgattgcatgaaatcttgaccgtcaagcggccactcttatcgtttaagaataatacagaacgaattatgatagaaattagcaatgttaaagtgactcctccagattactcacctataatcgcgagtattaaaggtaagagttatgacgcattagccacgttcactgtaaatatctttaaagaggtaatgaccaaagagggtatatccatcactaaaataagtagttatgagggaaaagattctcatttgataaaaattccgctactaataggatacgggaataaaaatccacttgatacagccaagtatcttgttcctaatgtcataggtggagtctttatcaataaacaatctgtcgaaaaagtaggaattaatctagtagaaaagattacaacatggccaaaatttagggttgttaagccaaactcattcactttctcgttttcctccgtatcccctcctaatgtattaccgacaagatatcgccattacaagatatctctggatatatcacaattggaagcgttgaatatatcatcgacaaagacatttataacggtcaatattgttttgctgtctcaatatttatctagagtgagtctagaattcattagacgtagtttatcatacgatatgcctccagaagttgtctatctagtaaacgcgataatagatagtgctaaacgaattactgaatctattactgactttaatattgatacatacattaatgacctggtggaagctgaacacattaaacaaaaatctcagttaacgattaacgagttcaaatatgaaatgctgcataactttttacctcatatgaactatacacccgatcaactaaagggattttatatgatatctttactaagaaagtttctctactgtatcttccacacttctagatatccagatagagattcgatggtttgtcatcgcatcctaacgtacggcaaatattttgagacgttggcacatgatgaattagagaattacataggcaacatccgaaacgatatcatgaacaatcacaagaacagaggcacttacgcggtaaacattcatgtactaacaactcccggacttaatcacgcgttttctagcttattgagtggaaagttcaaaaagtcagacggtagttatcgaacacatcctcactattcatggatgcagaatatttctattcctaggagtgttggattttatccggatcaagtaaagatttcaaagatgttttctgtcagaaaataccatccaagtcaatatctttacttttgttcatcagacgttccggaaagaggtcctcaggtaggtttagtatctcaattgtctgtcttgagttccattacaaatatactaacgtctgagtatttggatttggaaaagaaaatttgtgagtatatcagatcatattataaagatgatataagttactttgaaacaggatttccaatcactatagaaaatgctctagtcgcatctcttaatccaaatatgatatgtgattttgtaactgactttagacgtagaaaacggatgggattcttcggtaacttggaggtaggtattactttagttagggatcacatgaatgaaattcgcattaatattggagcgggaagattagtcagaccattcttggttgtggataacggagagctcatgatggatgtgtgtccggagttagaaagcagattagacgacatgacattctctgacattcagaaagagtttccgcatgtcatcgaaatggtagatatagaacaatttacttttagtaacgtatgtgaatcggttcaaaaatttagaatgatgtcaaaggatgaaagaaagcaatacgatttatgtgactttcctgccgaatttagagatggatatgtagcatcttcactagtgggaatcaatcacaattctggacccagagctattcttggatgtgctcaagctaaacaagctatctcttgtctgagttcggatatacgaaataaaatagacaatggaattcatttgatgtatccagagaggccaatcgtgattagtaaggctttagaaacttcaaagattgcggctaattgcttcggccaacatgttactatagcattaatgtcgtacaaaggtatcaatcaagaggatggaattatcatcaaaaaacaatttattcagagaggcggtctcgatattgttacagccaagaaacatcaagtagaaattccattggaaaactttaataacaaagaaagagataggtctaacgcctattcaaaattagaaagtaatggattagttagactgaatgctttcttggaatccggagacgctatggcacgaaatatctcatcaagaactcttgaagatgattttgctagagataatcagattagcttcgatgtttccgagaaatataccgatatgtacaaatctcgcgttgaacgagtacaagtagaacttactgacaaagttaaggtacgagtattaaccatgaaagaaagaagacccattctaggagacaaatttaccactagaacgagtcaaaagggaacagtcgcgtatgtcgcggatgaaacggaacttccatacgacgaaaatggtatcacaccagatgtcattattaattctacatccatcttctctagaaaaactatatctatgttgatagaagttattttaacagccgcatattctgctaagccgtacaacaataagggagaaaaccgacctgtctgttttcctagtagtaacgaaacatccatcgatacatatatgcaattcgctaaacaatgttatgagcattcaaatccgaaattgtccgatgaagaattatcggataaaatcttttgtgaaaagattctctatgatcctgaaacggataagccttatgcatccaaagtattttttggaccaatttattacttgcgtctgaggcatttaactcaggacaaggcaaccgttagatgtagaggtaaaaagacgaagctcattagacaggcgaatgagggacgaaaacgtggaggaggtatcaagttcggagaaatggagagagactgtttaatagcgcatggtgcagccaatactattacagaagttttgaaagattcggaagaagattatcaagatgtgtatgtttgtgaaaattgtggagacatagcagcacaaatcaagggtattaatacatgtcttagatgttcaaaacttaatctctctcctctcttaacaaaaattgataccacgcacgtatctaaagtatttcttactcaaatgaacgccagaggcgtaaaagtcaaattagatttcgaacgaaggcctccttcgttttataaaccattagataaagttgatctcaagccgtcttttctggtgtaatattctagtttggtagtagatacatatcaatatcatcaaattcgagatccgaattataaaatgggcgtggattgttaactatagaatcggacgtctgatattcgaaaatctgtggagtttcaggttttggtggaggtgtaactgctacttgggatactgaagtctgatattcagaaagctgtggatgttctggttcggcatccaccgatggtgtcacatcactaatcggttcggtaacgtctgtggatggaggtgctacttctacagaacctgtagcctcagttgtcaacggagatacatttttaatgcgagaaaatgtataatttggtaatggtttcttatgtggatctgaagaagaggtaagatatctactagaaagataccgatcacgttctagttctcttttgtagaacttaactttttctttctccgcatctagttgatattccaacctcttcacgttactacgttcagattccaattcacgttcgcatgggttacctccgcagtttttacgagcgatttcacgttcagccttcatgcgtctctccctctctctatcgagtttatcagagcagtctttctgaaggcgatcgaactccataaatttctccaacgctttgattgtttccatagatttccgaagttcagcttttaggactgtgattctttttctttcgaattcacagctggatgtacaaccgtttccattaccgccatctctaagtttcttttctagatcggcaacatttcatccccatgccttttacattcctcgagtctactgtcgtcgaaatatcgttccagctccttttcgacatcaataactttagcacgttgtctctcaagctctcttttgtagttatctgattccctggcacgtttaagatcttcatgcaattgagtcagctcttaacttcctctcttgcttcttcgtcatagtacgcgcaatcactgtgagatccattgttaccacgtctacactcggcgagctcgcgtttaagagattcaatttcccgtttgtattggtccatgtttccattgctaccaccattagatttacaggctgctagttgtcgttcgagatcagaaatacgggttttcttggaattgatttcgtcgatgtacttggcatcgaaacacttattaagttctttttccaattctacgattttatttctttcgcgagtcaattccctcctgtagtaactatctgttttgtcagattcacgctctctacgtagactttcttgcaagttactaatttgttccctagcacgtccgagtttagttttatatgctgaatagagttctgattcatcctttgagcagatctctagcgatcgtttaagattcctaattctagtctttagcctatttacctcctcagaagatgttccgttaccgttgcgtttacactcgttaagctgtctatcaagatccatgattctatctctaagacgttgcatctctctttccatatcagcattgctttcattattacgtctgcagtcactcaactgtctttcaatatctgagattctatctctaagacgtcgcatctctctctgtttcggcattggtttcattattacgtctacagtcgttcaactgtctttcaagatctgatattctagattggagtctgctaatctctgtagcattttcacggcattcactcagttgtctttcaagatctgaaattttagattggagtctgctaatctctgtaagatttcctcctccgctctcgatgcagtcggtcaacttattctctagttctctaatacgcgaacgcagtgcatcaacttcttgcgtgtcttcctggttgcgtgtacattcatcgagtctagattcgagatctctaacgcgtcgtcgttcttcctcaagttctctgcgtactacagaaagcgtgtccttatcttgttgatatttagcaatttctgattctagagtactgattttgcttacgtagttactaatatttgtcttggccttatcaagatcctccttgtatttgtcgcattccttgatatccctacgaagtctggacagttcccattcgacattacgacgtttatcgatttcagctcggagatcgtcatcgcgttgttttagccacatacgactgagttcaagttctcgttgacaagatccatctacttttccattcctaatagtatccagttccttttctagttctgaacgcatttctcgttccctatcaagcgattctctcaattctcggatagtcttcttatcaatttctaataaatctgaaccatcatctgtcccattttgaatatccctgtgttctttgatctcttttgtaagtcggtcgattctttcggttttataaacagaatccctttccaaagtcctaatcttactgagtttatcactaagttctgcattcaattcggtgagttttctcttggcttcttccaactctgttttaaactctccactatttccgcattcttcctcgcatttatctaaccattcaattagtttattaataactagttggtaatcagcgattcctatagccgttcttgtaattgtgggaacataattaggatcttctaatggattgtatggcttgatagcatcatctttatcattattagggggatggacaaccttaattggttggtcctcatctcctccagtagcgtgtggttcttcaataccagtgttagtaataggcttaggcaaatgcttgtcgtacgcgggcacttcctcatccatcaagtatttataatcgggttctacttcagaatattcttttctaagagacgcgacttcgggagttagtagaagaactctgtttctgtatctatcaacgctggaatcaatactcaagttaaggatagcgaatacctcatcgtcatcatccgtatcttctgaaacaccatcatatgacatttcatgaagtctaacgtattgataaatagaatcagatttagtattaaacagatccttaacctttttagtaaacgcatatgtatattttagatctccagatttcataatatgatcacatgccttaaatgtcagtgcttccatgatataatctggaacactaatgggtgacgaaaaagatacagcaccatatgctacgttgataaataaatctgaaccactaagtagataatgattaatgttaagaaagaggaaatattcagtgtataggtatgtcttggcgtcatatcttgtactaaacacgctaaacagtttgttaatgtgatcaatttccaatagattaattagagcagcgggaataccaacaaacatattaccacatccgtattttctatgaatatcacatatcatgttaaaaaatcttgatagaagagcgaatatctcgtctgacttaatgagtcgtagttcagcagcaacataagtcataactgtaaatagaacatactttcctgtagtgttgattctagactccacatcaacaccattattaaaaatagttttatatacatctttaatctgctctccgttaatcgtcgaacgttctagtatacggaaacactttgatttcttatctgtagttaatgacttagtgatatcacgaagaatattacgaattacatttcttgtttttcttgagagacctgattcagaactcaactcatcgttccatagtttttctacctcagtggcgaaatctttggagtgcttggtacatttttcaataaggttcgtgacctccatttattataaaaaatttattcaaaacttaactacaatcgggtaattataaaatcgtagatctcccatgtggcggaatactaccatctatcgcatgtggatggacagtaggtaatggccatgggaacagtaatgtttgcatatttatctttcttgccagtattactgcatattgtcccaatgtttcgatgtgatgttctaacctatcaactgccgctgtatcacaacaatagtgtccgatgaaattaagattatgatccaatgtgtttaatatatgattatcaagtcttatacgatccgcgtcttttttgacaggatcaggttcttctacaggaagaagtttcggcctcttatgatattcatgtctgggaaacggtggtctagggtgaggctccggtatcggagtgggttttggattataatcatcatcgtctatgacatcatcttcgacttcgatatttattttgctatcttgatgatgtcctgtatcagttgcattttcagcactcgactgaatattagcgcattcattgtctattattaccatatttctaaacccaaaatgtatgtgttgaacatcagtactatcgttgatgagtcttatagcatgaattcgcttatcgttatcgggtttatcttctgtcaccttagcaattccttttttattaaactctacataatcatatccatttctattgtttgttctaatataaacgagtatagcatcattgctaaatttttcaatagtatcaaaaacagaatatcctaaaccatataatatatattcaggaacactcaaactaaatgtccaggattctcctaaatacgtaaactttaatagtgcgaaatcattcaaaaatctaccacttatagatagatagtacataaatgcgtatagtagtctacctatctctttattatgaaaaccggcattacgatcatatatgtcgtgatatacctgtgatccgtttacgttaaaccataaatacatgggtgatcctataaacatgaatttatttctaattctcagagctatagttaattgaccgtgtaatatttgcttacatgcatacttgatacgcttattaataagatttttatcattgctcgttatttcagaatcgtatatataaggagtaccatcgtgattcttaccagatattatacaaaatactatatataaaatatattgacccacgttagtaatcatataaatgtttaacgttttaaattttgtattcaatgatccattatcatacgctatcatggtcttgtaatattcattctttaaaatataatattgtgttagccattgcattggagctcctaatggagattttctattctcatccattttaggataggctttcataaagtccctaataacttcgtgaataatgtttctatgttttctactgatgcatgtatttgcttcgatttttttatcccatgtttcatctatcatagatttaaacgcagtaatgctcgcaacattaacatcttgaaccgttggtacaattccgttccataaatttataatgttcgccatttatataactcattttttgaatatacttttaattaacaaaagagttaagttactcatatggacgccgtccagtctgaacatcaatctttttagccagagatatcatagccgctcttagagtttcagcgtgattttccaacctaaatagaacttcatcgttgcgtttacaacacttttctatttgttcaaactttgttgttacattagtaatctttttttccaaattagttagccgttgtttgagagtttcctcattgtcgtcttcatcggctttaacaattgcttcgcgtttagcctctggctttttagcagcctttgtagaaaaaaattcagttgctggaattgcaagatcgtcatctccggggaaaagagttccgtccatttaaagtacagattttagaaactgacactctgcgttatttatatttggtacaacacatggattataaatattgatgttaataacatcagaaaatgtaaagtctatacattgttgcatcgtgttaaattttctaatggatctagtattattgggtccaacttctgcctgaaatccaaatatggaagcggatacaaaaccgtttcctggataaaccacacatctccacttttgctttacatcagaaattgtgtcgttgacatcttgaactctcctatctaatgccggtgttccacctatagattttgaatattcgaatgctgcatgagtagcattaaattccttaatattgccataattttcatatattgagtaaccctggataaaaagtaaacacaccgcagccgtcgctaccacaataaaaaaaattgatagagagttcatttataatctattagaagctgacaaaatttttttacacgcatcagacaatgctttaataaatagttcaacatctacttttgtcatatcgaaccgatggtatgattctaacctagaattacatccgaaaaagttgactatgttcatagtcattaagtcattaacaaacaacattccagactctggattataagacgatactgtttcgtcacaattacctaccttaatcatgtgattatgaatattggctattagagcaccttctaagaaatctataatatctttgaaacacgatttaaaatcaaaccacgaatatacttctacgaagaaagttagtttacccataggagaaataactataaatggagatctaaatacaaaatccggatctatgatagttttaacattattatattctctattaaatacctccacatctaaaaatgttaattttgaaactatgtcttcgtttattaccgtacctgaactaaacgctataagctctattgtttgagaactctttaaacgatattcttgaaatacatgtaacaaagtttcctttaactcggtcggtttatctaccatagttacagaatttgtatccttatctataatataataatcaaaatcgtataaagttatataattatcgcgttcagattgggatcttttcaaatagactaaaaaccccatttctctagtaagtatcttatgtatatgtttgtaaaatatcttcatggtgggaatatgctctaccgcagttagccattcctcattgacagcggtagatgtattagacaaaactattccaatgtttaacaagggccattttacgagattattaaatccttgtttgataaatgtagccaatgagggttcgagttcaacgacgattgaattctcttcccgcggatgctgcatgatgaacgacgggatgttgttcgattgatttggaattctttttcgactttttgtttatattaaatattttaaaatttatagcggatagcaattcatgtaccacggataatgtagacgcgtattgcgcatcgatatctttattattagataaatttatcaataaatgtgagaagtttgcctcgttaaggtcttccatttaaatattatataaacatttgtgtttgtaacttattcgtcttttatggaatagttttttactagtaaagctgcaattacacactttgtccgtaaaacataaatataaacaccagcttttatcaatcgttccaaaaagtcgacggcggacatttttaacatggcatctattttaaatacacttaggtttttggaaaaaacatcattttataattgtaacgattcaataactaaagaaaagattaagattaaacataagggaatgtcatttgtattttataagccaaagcattctaccgttgttaaatacttgtctggaggaggtatatatcatgatgatttggttgtattggggaaggtaacaattaataatctaaagatgatgctattttacatggatttatcatatcatggagtgacaagtagtggagcaatttacaaattgggatcgtctatcgatagactttctctaaataggactattgttacaaaagttaataattatgatgatacattttttgacgacgatgattgatcgctattgcacaattttgtttttgtactttctaatatagtgtttaggttctttttcatatgagaatattgatttactaaaatatctatgtttaacttttgttctatgacgtccttatcggcggtatcggtacatatacgtaattcaccttcacaaaatacggagtcttcgataataatagccaatcgattattggatctagctgtctgtatcatattcaacatgtttaatatatcctttcgtttcccctttacaggcatcgatcgtagcatattttccgcgtctgatatggaaatgttaaaactacaaaaatgcgtaatgttagcccgtcctaatattggtacgtgtctataagtttggcatagtagaataatagacgtgtttaaatgccttccaaagtttaagaattctattagagtattgcattttgatagtttatcgcctacatcatcaaaaataagtaaaaagtgtgctgattttttatgattttgtgcgacagcaatacatttttctatgttacttttagttcgtatcagattatattctagagattcctgactactaacgaaattaatatgatttggccaaatgtatccatcataatctgggttataaacgggtgtaaacaagaatatatgtttatattttttaactagtgtagaaaacagagatagtaaatagatagtttttccagatccagatcctcctgttaaaaccattctaaacggcatttttaataaattttctcttgaaaattgtttttcttggaaacaattcataattatatttacagttactaaattaatttgataataaatcaaaatatggaaaactaaggttgttagtagggaggagaacaaagaaggcacatcgtgatataaataacatttattatcatgatgacaccagaaaacgacgaagagcagacatctgtgttctccgctactgtttacggagacaaaattcagggaaagaataaacgcaaacgcgtgattggtctatgtattagaatatctatggttatttcactactatctatgattaccatgtccgcgtttctcatagtgcgcctaaatcaatgcatgtctgctaacgaggctgctattactgacgccgctgttgccgttgctgctgcatcatctactcatagaaaggttgcgtctagcactacacaatatgatcacaaagaaagctgtaatggtttatattaccagggttcttgttatatattacattcagactaccagttattctcggatgctaaagcaaattgcactgcggaatcatcaacactacccaataaatccgatgtcttgactacctggctcattgattatgttgaggatacatggggatctgatggtaatccaattacaaaaactacatccgattatcaagattctgatgtatcacaagaagttagaaagtatttttgtgttaaaacaatgaactaatatttatttttgtacattaataaatgaaatcgcttaatagacaaactgtaagtaggtttaagaagttgtcggtgccggccgctataatgatgatactctcaaccattattagtggcataggaacatttctgcattacaaagaagaactgatgcctagtgcttgcgccaatggatggatacaatacgataaacattgttatttagatactaacattaaaatgtctacagataatgcggtttatcagtgtcgtaaattacgagctagattgcctagacctgatactagacatctgagagtattgtttagtattttttataaagattattgggtaagtttaaaaaagaccaatgataaatggttagatattaataatgataaagatatagatattagtaaattaacaaattttaaacaactaaacagtacgacggatgctgaagcgtgttatatatacaagtctggaaaactggttaaaacagtatgtaaaagtactcaatctgtactatgtgttaaaaaattctacaagtgacaacaaaaaatgaattaataataagtcgttaacgtacgccgccatggacgccgcgtttgttattactccaatgggtgtgttgactataacagatacattgtatgatgatctcgatatctcaatcatggactttataggaccatacattataggtaacataaaaactgtccaaatagatgtacgggatataaaatattccgacatgcaaaaatgctactttagctataagggtaaaatagttcctcaggattctaatgatttggctagattcaacatttatagcatttgtgccgcatacagatcaaaaaataccatcatcatagcatgcgactatgatatcatgttagatatagaagataaacatcagccattttatctattcccatctattgatgtttttaacgctacaatcatagaagcgtataacctgtatacagctggagattatcatctaatcatcaatccttcagataatctgaaaatgaaattgtcgtttaattcttcattctgcatatcagacggcaatggatggatcataattgatgggaaatgcaatagtaattttttatcataaaagttgtaaagtaaataataaaacaataaatattgaactagtagtacgtatattgagcaatcagaaatgatgctggtacctcttatcacggtgaccgtagttgcgggaacaatattagtatgttatatattatatatttgtaggaaaaagatacgtactgtctataatgacaataaaattatcatgacaaaattaaaaaagataaagagttctaattccagcaaatctagtaaatcaactgatagcgaatcagactgggaggatcactgtagtgctatggaacaaaacaatgacgtagataatatttctaggaatgagatattggacgatgatagcttcgctggtagtttaatatgggataacgaatccaatgttatggcgcctagcacagaacacatttacgatagtgttgctggaagcacgctgctaataaataatgatcgtaatgaacagactatttatcagaacactacagtagtaattaatgaaacggagactgttgaagtacttaatgaagataccaaacagaatcctaactattcatccaatcctttcgtaaattataataaaaccagtatttgtagcaagtcaaatccgtttattacagaacttaacaataaatttagtgagaataatccgtttagacgagcacatagcgatgattatcttaataagcaagaacaagatcatgaacacgatgatatagaatcatcggtcgtatcattggtgtgattagtttcctttttataaaattgaagtaatatttagtattattgctgccgtcacgttgtacaaatggagatattccctgtattcggcatttctaaaattagcaattttattgctaataatgactgtagatattatatagatacagaacatcaaaaaattatatctgatgagatcaatagacagatggatgaaacggtacttcttaccaacatcttaagcgtagaagttgtaaatgacaatgagatgtaccatcttattcctcatagattatcgacgattatactctgtattagttctgtcggaggatgtgttatctctatagataatgacatcaatggcaaaaatattctaacctttcccattgatcatgctgtaatcatatccccactgagtaaatgtgtcgtagttagcaagggtcctacaaccatattggttgttaaagcggatatacctagcaaacgattggtaacatcgtttacaaacgacatactatatgtaaacaatctgtcactgattaattatttgccgttgtctgtattcattattagacgagtcaccgactatttggatagacacatatgcgatcagatatttgctaataataagtggtattcccttataaccatcgacgataagcaatatcctattccatcaaactgtataggtatgtcctctgccaagtacataaattctagcatcgagcaagatactttaatccatgtttgtaacctcgagcatccgttcgactcagtatacaaaaaaatgcagtcgtacaattctctacctatcaaggaacaaatattgtacggtagaattgataatataaatatgagcattagtatttctgtggattaatagatttctagtatggggatcattaatcatctctaatctctaaatacctcataaaacgaaaaaaaagctattatcaaatactgtacggaatggattcattctcttctctttttatgaaactctgttgtatatctactgataaaactggaagcaaaaaatctgatagaaagaataagaataagatcaaggattatatggaacacgattattataaaataacaatagttcctggttcctcttccacgtctactagctcgtggtattatacacatgcctagtaatagtctctttgcgttgacggaaagcagactagaaataacaggctaaaatgttcagacaccataatagttcccaacccagataataacagagttccatcaacacattcctttaaactcaatcccaaacccaaaaccgttaaaatgtatccggccaattgatagtagataatgaggtgtacagcgcatgataatttacacagtaaccaaaatgaaaatactttagtaattataagaaatatagacggtaatgtcatcatcaacaatccgataatatgcctgagagtaaacattgacggataaaacaaaaatgctccgcataactctatcatggcaataacacaaccaaatacttgtaagattcctaaattagtagaaaatacaacgaatatcgatgtataagtgatctcgagaaataataagaataaagtaatgcccgtaaagataaacatcaacattgtttggtaatcattaaaccaattagtatgaagttgaactaatttcacagtagattttattccagtgttatcctcgcatgtataagtacctggtaagatatctttatattccataatcaatgagacatcactatctgataacgaatgaagtctagcactagtatgccatttacttaatattgtcgtcttggaagttttattataagttaaaatatcatggttatccaatttccatctaatatactttgtcggattatctatagtacacggaataatgatggtatcattacatgctgtatactctatggtctttgtagttgttataacaaccaacgtatagaggtatatcaacgatattctaactcttgacattttttatttatttaaaatgatacctttgttatttattttattctattttgctaacggtattgaatggcataagtttgaaacgagtgaagaaataatttctacttacttattagacgacgtattatacacgggtgttaatggggcggtatacacattttcaaataataaactaaacaaaactggtttaactaataataattatataacaacatctataaaagtagaggatgcggataaggatacattagtatgcggaaccaataacggaaatcccaaatgttggaaaatagacggttcagacgacccaaaacatagaggtagaggatacgctccttatcaaaatagcaaagtaacgataatcagtcacaacggatgtgtactatctgacataaacatatcaaaagaaggaattaaacgatggagaagatttgacggaccatgtggttatgatttattcacggcggataacgtaattccaaaagatggtttacgaggagcattcgtcgataaagacggtacttatgacaaagtttacattcttttcactgatactatcggctcaaagagaattgtcaaaattccgtatatagcacaaatgtgcctaaacgacgaaggtggtccatcatcattgtctagtcatagatggtcgacgtttctcaaagtcgaattagaatgtgatatcgacggaagaagttatagacaaattattcattctagaactataaaaacagataatgatacgatactatatgtattcttcgatagtccttattccaagtccgcattatgtacctattctatgaataccattaaacaatctttttctacgtcaaaattggaaggatatacaaagcaattgccgtctccagctcctggtatatgtttaccagctggaaaagttgttccacataccacgtttgaagtcatagaacaatataatgtactagatgatattataaagcctttatctaaccaacctatcttcgaaggaccgtctggtgttaaatggttcgatataaaggagaaggaaaatgaacatcgggaatatagaatatacttcataaaagaaaattctatatattcgttcgatacaaaatctaaacaaactcgtagctcgcaagtcgatgcgcgactattttcagtaatggtaactgcgaaaccgttatttatagcagatatagggataggagtaggaatgccacaaatgaaaaaaatacttaaaatgtaatcttaatcgagtacaccacacgacaatgaacaaacataagacagattatgctggttatgcttgctgcgtaatatgcggtctaattgtcggaattatttttacagcgacactattaaaagttgtagaacgtaaattagttcatacaccattaatagataaaacgataaaagatgcatatattagagaagattgtcctactgactggataagctataataataaatgtatccatttatctactgatcgaaaaacctgggaggaaggacgtaatgcatgcaaagctctaaattcaaattcggatctaattaagatagagactccaaacgagttaagttttttaagaagccttagacgaggctattgggtaggagaatccgaaatattaaaccagacaaccccatataattttatagctaagaatgccacgaagaatggaactaaaaaacggaaatatatttgtagcacaacgaatactcccaaactgcattcgtgttacactatataacaattacactacatttttatcataccactacttcggttagatgttttagaaaaaaataaatatcgccgtaccgttcttgtttttataaaaataacaattaacaattatcaaattttttctttaatattttacgtggttgaccattcttggtggtaaaataatctcttagtgttggaatggaatgctgtttaatgtttccacactcatcgtatattttgacgtatgtagtcacatcgtttacgcaatagtcagactgtagttctatcatgcttcctacatcagaaggaggaacagttttaaagtctcttggttttaatctattaccgttagttttcatgaaatcctttgttttatccacttcacattttaaataaatgtccactatacattcttttgttaattttactagatcgtcatgggtcatagaatttataggttccgtagtccatggatccaaactagcaaacttcgcgtatacggtatcgcgattagtgtatacaccaactgtatgaaaattaagaaaacagtttaataaatcaacagaaatatttaatcctccgtttgatacagatgcgccatatttatggatttcggattcacacgttgtttgtctgaggtgttcgtctagtgttgcttctacgtaaacttcgattcccatatattctttattgtcagaatcgcataccgatttatcatcatacactgtttgaaaactaaatggtatacacatcaaaataataaataataacgagtacattctgcaatattgttatcgtaattggaaaaatagtgttcgagtgagttggattatgtgagtattggattgtatattttattttatattttgtaataagaataaaatgctaatgtcaagtttattccaatagatgtcttattaaaaacatatataataaataacaatggctgaatggcataaaattatcgaggatatctcaaaaaataataagttcgaggatgccgccatcgttgattacaagactacaaagaatgttctagctgctattcctaacagaacatttgccaagattaatccgggtgaaattattcctctcatcactaatcgtaatattctaaaacctcttattggtcagaaatattgtattgtatatactaactctctaatggatgagaacacgtatgctatggagttgcttactgggtacgcccctgtatctccgatcgttatagcgagaactcataccgcacttatatttttgatgggtaagccaacaacatccagacgtgacgtgtatagaacgtgtagagatcacgctacccgtgtacgtgcaactggtaattaaaataaaaagtaatattcatatgtagtgtcaattttaaatgatgatgatgaaatggataatatccatattgacgatgtcaataatgccggtattggcatacagttcatcgatttttagatttcattcagaggatgtggaattatgttatgggcatttgtattttgataggatctataatgtagtaaatataaaatataatccgcatattccatatagatataattttattaatcgcacgttaaccgtagatgaactagacgataatgtcttttttacacatggttattttttaaaacacaaatatggttcacttaatcctagtttgattgtctcattatcaggaaacttaaaatataatgatatacaatgctcagtaaatgtatcgtgtctcattaaaaatttggcaacgagtacatctactatattaacatctaaacataagacttattctctacatcggtccacgtgtattactataataggatacgattctattatatggtataaagatataaatgacaagtataatgacatctatgattttactgcaatatgtatgctaatagcgtctacattgatagtgaccatatacgtgtttaaaaaaataaaaatgaactcttaattatgctatgctattagaaatggataaaatcaaaattacggttgattcaaaaattggtaatgttgttaccatatcgtataacttggaaaagataactattgatgtcacacctaaaaagaaaaaagaaaaggatgtattattagcgcaatcagttgctgtcgaagaggcaaaagatgtcaaggtagaagaaaaaaatattatcgatattgaagatgacgatgatatggatgtagaaagcgcataatacgatctataaaaataagtatataaatactttttatttactgtactcttactgtgtagtggtgataccctactcgattatttttttaaaaaaaaaatacttattctgattcttctaaccatttccgtgttcgttcgaatgccacatcgacgtcaaagataggggagtagttaaaatctagttctgcattgttggtacacaccttaaatgtagtgttggatatcttcaacgtatagttgttgagtagtgatggttttctaaatagaattctcttcatatcattcttgcacgcgtacatttttagcatccatcttggaaaccttaactttcgaggttattggttgtggatcttctacaatatctatgactctgatttcttgaacatcatctgcactaattaacagttttactatatacctgcctagaaatccggcaccaccagtaaccgcgtacacggccattgctgccactcataatatcagactacttattctattttactaaataatggctgtttgtataatagaccacgataatatcagaggagttatttactttgaaccagtccatggaaaagataaagttttaggatcagttattggattaaaatccggaacgtatagtttgataattcatcgttacggagatattagtcaaggatgtgattccataggcagtccagaaatatttatcggtaacatctttgtaaacagatatggtgtagcatatgtttatttagatacagatgtaaatatatctacaattattggaaaggcgttatctatttcaaaaaatgatcagagattagcgtgtggagttattggtatttcttacataaatgaaaagataatacattttcttacaattaacgagaatggcgtttgatatatcagttaatgcgtctaaaacaataaatgcattagtttacttttctactcagcaaaataaattagtcatacgtaatgaagttaatgatacacactacactgtcgaatttgatagggacaaagtagttgacacgtttatttcatataatagacataatgacaccatagagataagaggggtgcttccagaggaaactaatattggttgcgcggttaatacgccggttagtatgacttacttgtataataagtatagttttaaactgattttagcagaatatataagacacagaaatactatatccggcaatatttattcggcattgatgacactagatgatttggctattaaacagtatggagacattgatctattatttaatgagaaacttaaagtagactccgattcgggactatttgactttgtcaactttgtaaaggatatgatatgttgtgattctagaatagtagtagctctatctagtctagtatctaaacattgggaattgacaaataaaaagtataggtgtatggcattagccgaacatatatctgatagtattccaatatctgagctatctagactacgatacaatctatgtaagtatctacgcggacacactgagagcatagaggataaatttgattattttgaagacgatgattcgtctacatgttctgccgtaaccgacagggaaacggatgtataattttttttatagcgtgaaggatatgataaaaaatataattgttgtatttatcccattccaatcaccttatatgattctgtaacacaataaaggagtcttatagatgtatagaggtcagatactggtttgataaactgtttattccacataagtatgtttgactttatggttagacccgcatactttaacaaatcactgaaaattggagttaggtattgacctctcagaatcagttgccgttctggaacattaaatgtattttttatgatatactccaacgcatttatgtgggcatacaacaagtcattactaatggaatattccaagagttttagttgtctagtatttaacaagagaagagatttcaacagactgtttatgaactcgaatgccgcctcattgtcgcttatattgatgatgtcgaattctcccaatatcatcaccgatgagtagctcatcttgttatcgggatccaagttttctaaagatgtcattaaaccctcgatcatgaatggatttatcatcatcgtttttatgttggacatgagcttagtccgtttgtccacatctatagaagatgatttctgaattatttcatatatctctctctttaactccaggaacttgtcaggatggtctactttaatatgttctcgtctaagagatgaaaatctttggatggttgcacgcgacttttctctaaaggatgacgttgcccaagatcctctcttaaatgaatccatcttatccttggacaagatggacagtctattttccttagatggtttaatatttttgttacccatgatctataaaggtagacctaatcgtctcggatgaccatatatttattttcagttttattatacgcataaattgtaaaaaatatgttaggtttacaaaaatgtctcgtggggcattaatcgtttttgaaggattggacaaatctggaaaaacaacacaatgtatgaacatcatggaatctataccggcaaacacgataaaatatcttaactttcctcagagatccactgtcactggaaaaatgatagatgactatctaactcgtaaaaaaacctataatgatcatatagttaatctattattttgtgcaaatagatgggagtttgcatcttttatacaagaacaactagaacagggaattactttaatagttgatagatacgcattttctggagtagcgtatgccgccgctaaaggcgcgtcaatgactctcagtaagagttatgaatctggattgcctaaacccgacttagttatattcttggaatctggtagcaaagaaattaatagaaacgtcggcgaggaaatttatgaagatgttacattccaacaaaaggtattacaagaatataaaaaaatgattgaagaaggagatattcattggcaaattatttcttctgaattcgaggaagatgtaaagaaggagttgattaagaatatagttatagaggctatacacacggttactggaccagtggggcaactgtggatgtaatagtgaaattacattttttataaatagatgttagtacagtgttataaatggatgaagcatattactctggcaacttggaatcagtactcggatacgtgtccgatatgcataccgaactcgcatcaatatctcaattagttattgccaagatagaaactatagataatgatatattaaacaaggacattgtaaattttatcatgtgtagatcaaacttggataatccatttatctctttcctagatactgtatatactattaaaaataactagttataagtttgaatccgtcaattttgattccaaaattgaatggactggggatggtctatacaatatatcccttaaaaattatggcatcaagacgtggcaaacaatgtatacaaatgtaccagaaggaacatacgacatatccgcatttccaaagaatgatttcgtatctttctgggttaaatttgaacaaggcgattataaagtggaagagtattgtacgggactatgcgtcgaagtaaaaattggaccaccgactgtaacattaactgaatacgacgaccatatcaatttgtacatcgagcatccgtatgctactagaggtagcaaaaagattcctatttacaaacgcggtgacatgtgtgatatctacttgttgtatacggctaacttcacattcggagattctaaagaaccagtaccatatgatatcgatgactacgattgcacgtctacaggttgcagcatagactttgtcacaacagaaaaagtgtgcgtgacagcacagggagccacagaagggtttctcgaaaaaattactccatggagttcgaaagtatgtctgacacctaaaaagagtgtatatacatgcgcaattagatccaaagaagatgttcccaatttcaaggacaaaatggccagagttatcaagagaaaatttaatacacagtctcaatcttatttaactaaatttctcggtagcacatcaaatgatgttaccacttttcttagcatgcttaacttgactaaatattcataattattttttattaatgatacaaaaacgaaataaaactgcatattatacactggttaacgcccttataggctctaaccattttcaagatgaggtccctgattatagtccttctgttcccctctatcatctactccatgtctattagacgatgtgagaagactgaagaggaaacatggggattgaaaatagggttgtgtataattgccaaagatttctatcccgaaagaactgattgcagtgttcatctcccaactgcaagtgaaggattgataactgaaggcaatggattcagggatatacgaaacaccgataaattataaaaaaagcaatgtgtccgctgtttccgttaataatactattttcgtaactggcggattattcataaataactctaatagcacgatcgtggacatttataaagacaaacaatggtcgattatagaaatggctagggtatatcacggcatcgactcgacatttggaatgttatattttgccggaggtctatccgttaccgaacaatatggtaatttagagaaaaacaacgagatatcttgttacaatcctagaacgaataagtggtttgatatttcatatactatttataagatatccatatcatcattgtgtaaactaaataacgtcttctatgtatttagtaaggacattggatatgtggaaaagtatgatggtgcatggaagttagtacatgatcgtctccccgctataaaggcattatcaacttctccttattgattgaaaatgaaaatataaatagtttttatgtatagcagtattaccctatagttttattgcttactactaacatggatacagatgttacaaatgtagaagatatcataaatgaaatagatagagagaaagaagaaatactaaaaaatgtagaaattgaaaataataaaaacattaacaagaatcatcccaatgaatatattagagaagcactcgttattaataccagtagtaatagtgattccattgataaagaagttatagaatgtatcagtcacgatgtaggaatatagatcatatctactaatttttataatcgatacaaaacataaaaaacaactcgttattacatagcaggcatggaatccttcaagtattgttttgataacgatggcaagaaatggattatcggaaatactttatattctggtaattcaatactctataaggtcagaaaaaatttcactagttcgttctacaattacgtaatgaagatagatcacaaatcacacaagccattgttgtctgaaatacgattctatatatctgtattggatcctttgactatcgacaactggacacgggaacgtggtataaagtatttggctattccagatctgtatggaattggagaaaccgatgattatatgttcttcgttataaagaattcgggaagagtattcgccccaaaggatactgaatcagtcttcgaagcatgcgtcactatgataaacacgttagagtttatacactctcgaggatttacccatggaaaaatagaaccgaggaatatactgattagaaataaacgtctttcactaattgactattctagaactaacaaactatacaagagtggaaactcacatatagattacaacgaggacatgataacttcaggaaatatcaattatatgtgtgtagacaatcatcttggagcaacagtttcaagacgaggagatttagaaatgttgggatattgcatgatagaatggttcggtggcaaacttccatggaaaaacgaaagtagtataaaagtaataaaacaaaaaaaagaatataaaaaatttatagctactttctttgaggactgttttcctgaaggaaatgaacctctggaattagttagatatatagaattagtatacacgttagattattctcaaactcctaattatgacagactacgtaaactgtttatacaagattgaaattatattcttttttttatagagtgtggtagtgttacggatatctaatattaatattagactatctctatcgcgctacacgaccaatatcgattactatggatatcttctatgaaaggagagaatgtatttatttctccagcgtcaatctcgtcagtattgacaatactgtattatggagctaatggatccactgctgaacagctatcaaaatatgtagaaacggaggagaacacggataaggttagcgctcagaatatctcattcaaatccatgaataaagtatatgggcgatattctgccgtgtttaaagattcctttttgagaaaaattggcgataagtttcaaactgttgacttcactgattgtcgcactatagatgcaatcaacaagtgtgtagatatctttactgaggggaaaatcaatccactattggatgaaccattgtctcctagcaattagtgccgtatactttaaagcaaaatggttgacgccattcgaaaaggaatttaccagtgattatcccttttacgtatctccgacggaaatggtagacgtaagtatgatgtctatgtacggcaaggcatttaatcacgcatctgtaaaagaatcattcggcaacttttcaatcatagaactgccatatgttggagatactagtatgatggtcattcttccagacaagattgatggattagaatccatagaacaaaatctaacagatacaaattttaagaaatggtgtgactttatggatgctatgtttatagatgttcacattcccaagtttaaggtaacaggctcgtataatctggtggatactctagtaaagtcaggactgacagaggtgttcggttcaactggagattatagcaatatgtgtaatttagatgtgagtgtcgacgctatgatccacaaaacgtatatagatgtcaatgaagagtatacagaagcagctgcagcaacttctgtactagtggcagactgtgcatcaacaattacaaatgagttctgtgcagatcatccgttcatctatgtgattaggcatgttgatggaaaaattcttttcgttggtagatattgctctccgacaactaattgttaaccattttttttaaaaaaaacaatgggtgatggatacacttgatggtataatgatgaatgaacgcgatgtttctgtaagcgttggcaccggaatactattcatggaaatgtttttccgttacaataaaaatagtatcaacaatcaactaatgtatgatataattaatagcgtatctataagtgtagctaattatagatatagaagctgcttttaacgacgatggtatatacatccgtagaaatatgattaacaagttgtacggatacgcatctctaactactattggcacgatcgctggaggtgtttgttattatctgttgatgcatctagttagtttgtataaataattatttcaatatactagttaaaattttaagattttaaatgtataaaaaactaataacgtttttatttgtaataggtgcattagcatcctattcgaataatgagtacactccgtttaataaactgagtgtaaaactctatatagatggagtagataatatagaaaattcatatactgatgataataatgaattggtgttaaattttaaagagtacacaatttctattattacagagtcatgcgacgtcggatttgattccatagatatagatgttataaacgactataaaattattgatatgtataccattgactcgtctactattcaacgcagaggtcacacgtgtagaatatctaccaaattatcatgccattatgataagtacccttatattcacaaatatgatggtgatgagcgacaatattctattactgcagagggaaaatgctataaaggaataaaatatgaaataagtatgatcaacgatgatactctattgagaaaacatactcttaaaattggatctacttatatatttgatcgtcatggacatagtaatacatattattcaaaatatgatttttaaaaatttaaaatatattatcacttcagtgacagtagtcaaataacaaacaacaccatgagatatattataattctcgcagttttgttcattaatagtatacacgctaaaataactagttataagtttgaatccgtcaattttgattccaaaattgaatggactggggatggtctatacaatatatcccttaaaaattatggcatcaagacgtggcaaacaatgtatacaaatgtaccagaaggaacatacgacatatccgcatttccaaagaatgatttcgtatctttctgggttaaatttgaacaaggcgattataaagtggaagagtattgtacgggactatgcgtcgaagtaaaaattggaccaccgactgtaacattgactgaatacgacgaccatatcaatttgtacatcgagcatccgtatgctactagaggtagcaaaaagattcctatttacaaacgcggtgacatgtgtgatatctacttgttgtatacggctaacttcacattcggagattctaaagaaccagtaccatatgatatcgatgactacgattgcacgtctacaggttgcagcatagactttgtcacaacagaaaaagtgtgcgtgacagcacagggagccacagaagggtttctcgaaaaaattactccatggagttcgaaagtatgtctgacacctaaaaagagtgtatatacatgcgcaattagatccaaagaagatgttcccaatttcaaggacaaaatggccagagttatcaagagaaaatttaatacacagtctcaatcttatttaactaaatttctcggtagcacatcaaatgatgttaccacttttcttagcatgcttaacttgactaaatattcataactaatttttattaatgatacaaaaacgaaataaaactgcatattatacactggttaacgcccttataggctctaaccattttcaagatgaggtccctgattatagtccttctgttcccctccatgtctattagacgatgtgagaagactgaagaggaaacatggggattgaaaatagggttgtgtataattgccaaagatttttatcccgaaagaactgattgcagtgttcatctcccaactgcaagtgaaggattgataactgaaggcaatggattcagggatatacgaaacaccgataaattataaaaaaagcaatgtgtccgctgtttccgttaataatactattttcgtaactggcggattattcataaataactctaatagcacgatcgtggacatttataaagacaaacaatggtcgattatagaaatggctagggtatatcacggcatcgactcgacatttggaatgttatattttgccggaggtctatccgttaccgaacaatatggtaatttatagaaaaacaacgagatatcttgttacaatcctagaacgaataagtggtttgatatttcatatactatttataagatatccatatcatcattgtgtaaactaaataacgtcttctatgtatttagtaaggacattggatatgtggaaaagtatgatggtgcatggaagttagtacatgatcgtctccccgctataaaggcattatcaacttctccttattgattgaaaatgaaaatataaatagtttttatgtatagcagtattaccctatagttttattgcttactactaacatggatacagatgttacaaatgtagaagatatcataaatgaaatagatagagagaaagaagaaatactaaaaaatgtagaaattgaaaataataaaaacattaacaagaatcatcccaatgaatatattagagaagcactcgttattaataccagtagtaatagtgattccattgataaagaagttatagaatgtatcagtcacgatgtaggaatatagatcatatctactaatttttataatcgatacaaaacataaaaaacaactcgttattacatagcaggcatggaatccttcaagtattgttttgataacgatggcaagaaatggattatcggaaatactttatattctggtaattcaatactctataaggtcagaaaaaatttcactagttcgttctacaattacgtaatgaagatagatcacaaatcacacaagccattgttgtctgaaatacgattctatatatctgtattggatcctttgactatcgacaactggacacgggaacgtggtataaagtatttggctattccagatctgtatggaattggagaaaccgatggattatatgttcttcgttataaagaattcgggaagagtattcgccccaaaggatactgaatcagtcttcgaagcatgcgtcactatgataaacacgttagagtttatacactctcgaggatttacccatggaaaaatagaaccgaggaatataatattaaaacttaccacgtaaaacttaaaatttaaaatgatatttcattgacagatagatcacacattatgaactttcaaggacttgtgttaactgacaattgcaaaaatcaatgggtcgttggaccattaataggaaaaggtggatttggtagtatttatactactaatgacaataattatgtagtaaaaatagagcccaaagctaacggatcattatttaccgaacaggcattttatactagagtacttaaaccatccgttatcgaagaatggaaaaaatctcacaatataaagcacgtaggtcttatcacgtgcaaggcatttggtctatacaaatccattaatgtggaatatcgattcttggtaattaatagattaggtgcagatctagatgcggtgatcagagccaataataatagactaccaaaaaggtcggtgatgttgatcggaatcgaaatcttaaataccatacaatttatgcacgagcaaggatattctcacggagatattaaagcgagtaatatagtcttagatcaaatagataagaataaattatatctagtggattacggattggtttctaaattcatgtctaatggcgaacatgttccatttataagaaatccaaataaaatggataacggtactctagaatttacacctatagattcgcataaaggatacgttgtatctagacgtggagatctagaaacacttggatattgtatgattagatggttgggaggtatcttaccatggactaagatatctgaaacaaagaattgtgcattagtaagtgccacaaaacagaaatatgttaacaatactgcgactttgttaatgaccagtttgcaatatgcacctagagaattgctgcaatatattaccatggtaaactctttgacatattttgaggaacccaattacgacaagtttcggcacatattaatgcagggtgtatattattaagtgtggtgtttggtcgataaaaattaaaaaataacttaatttattattgatctcgtgtgtacaaccgaaatcatggcgatgttttacgcacacgctctcggtgggtacgacgagaatcttcatgcctttcctggaatatcatcgactgttgccaatgatgtcaggaaatattctgttgtgtcagtttataataacaagtatgacattgtaaaagacaaatatatgtggtgttacagtcaggtgaacaagagatatattggagcactgctgcctatgtttgagtgcaatgaatatctacaaattggaaatccgatccatgatcaagaaggaaatcaaatctctatcatcacatatcgccacaaaaactactatgctctaagcggaatcgggtacgagagtctagacttgtgtttggaaggagtagggattcatcatcacgtacttgaaacaggaaacgctgtatatggaaaagttcaacatgattattctactatcaaagagaaggccaaagaaatgagtgcacttagtccaggacctatcatcgattaccacgtctggataggagattgtatctgtcaagttactgctgtggacgtacatggaaaggaaattatgaaaatgagattcaaaaagggtgcggtgcttccgatcccaaatctggtaaaagttaaacttggggagaatgatacagaaaatctttcttctactatatcggcgacaccatcgaggtaaccacctctctggaagacagcgtgaataatgtactcatgaaacgtttggaaactatacgccatatgtggtctgttgtatatgatcattttgatattgtgaatggtaaagaatgctgttatgtgcatacgcatttgtctaatcaaaatcttataccgagtactgtaaaaacaaatttgtacatgaagactatgggatcatgcattcaaatggattccatggaagctctagagtatcttagcgaactgaaggaatcaggtggatggagtcccagaccagaaatgcaggaatttgaatatccagatggagtggaagacactgaatcaattgagagattggtagaggagttcttcaatagatcagaacttcaggctggtgaatcagtcaaatttggtaattctattaatgttaaacatacatctgtttcagctaagcaactaagaacacgtatacggcagcagcttccttctatactctcatcttttaccaacacaaagggtggatatttgttcattggagttgataataatacacacaaagtatttggattcacggtgggttacgactacctcagactgatagagaatgatatagaaaagcatatcaaaagactttgtgttgtgtatttctgtgagaagaaagaggacatcaagtacgcgtgtcgattcatcaaggtatataaacctggggatgaggctacctcgacatacgtgtgcgctatcaaagtggaaagatgctgttgtgctgtgtttgcagattggccagaatcatggtatatggatactaatggtatcaagaagtattctccagatgaatgggtgtcacatataaaattttaattaatgtaactatagagaacaaataataaggttgtaatatcatatagacaataactaacaattaattagtaactgttatctcttttttaattaaccaactaactatatacctattaatacatcgtaattatagttcttaacatctattaatcattaattcgcttctttaattttttataaactaacattgttaattgaaaagggataacatgttacagaatataaattatatatggatttttttaaaaaggaaatacttgactggagtatatatttatctcttcattatatagcacgcgtgttttccaatttttccacatcccatataatacaggattataatctcgttcgaacatacgagaaagtggataaaacaatagttgattttttatctaggttgccaaatttattccatattttagaatatggggaaaatattctacatatttattctatggatgatgctaatacgaatattataattttttttctagatagagtattaaatattaataagaacgggtcatttatacacaatctcgggttatcatcatccattaatataaaagaatatgtatatcaattagttaataatgatcatccagataataggataagactaatgcttgaaaatggacgtagaacaagacattttttgtcctatatatcagatacagttaatatctatatatgtattttaataaatcatggattttatatagatgccgaagacagttacggttgtacattattacatagatgtatatatcactataagaaatcagaatcagaatcatacaatgaattaattaagatattgttaaataatggatcagatgtagataaaaaagatacgtacggaaacacaccttttatcctattatgtaaacacgatatcaacaacgtggaattgtttgagatatgtttagagaatgctaatatagactctgtagactttaatagatatacacctcttcattatgtctcatgtcgtaataaatatgattttgtaaagttattaatttctaaaggagcaaatgttaatgcgcgtaataaattcggaactactccattttattgtggaattatacacggtatctcgcttataaaactatatttggaatcagacacagagttagaaatagataatgaacatatagttcgtcatttaataatttttgatgctgttgaatctttagattatctattatccagaggagttattgatattaactatcgtactatatacaacgaaacatctatttacgacgctgtcagttataatgcgtataatacgttggtctatctattaaacaaaaatggtgattttgagacgattactactagtggatgtacatgtatttcggaagcagtcgcaaacaacaacaaaataataatggaagtactattgtctaaacgaccatctttgaaaattatgatacagtctatgatagcaattactaaacataaacagcataatgcagatttattgaaaatgtgtataaaatatactgcgtgtatgaccgattatgatactcttatagatgtacagtcgctacagcaatataaatggtatattttaagatgtttcgatgaaatagatatcatgaagagatgttatataaaaaataaaactgtattccaattagttttttgtatcaaagacattaatactttaatgagatacggtaaacatccttctttcgtgaaatgcactagtctcgacgtatacggaagtcgtgtacgtaatatcatagcatctattagatatcgtcagagattaattagtctattatccaagaagctggatcctggagataaatggtcgtgttttcctaacgaaataaaatataaaatattggaaaactttaacgataacgaactatccacatatctaaaaatcttataaacattattaaaatataaaatctaagtaggataaaatcacactacatcattgtttccttttagtgctcgacagtgtatactatttttaacgctcataaataaaaatgaaaacgatttccgttgttacgttgttatgcgtactacctgctgttgtttattcaacatgtactgtacccactatgaataacgctaaattaacgtctaccgaaacatcgtttaatgataaccagaaagttacgtttacatgtgatcagggatatcattctttggatccaaatgctgtctgtgaaacagataaatggaaatacgaaaatccatgcaaaaaaatgtgcacagtttctgattatgtctctgaactatataataaaccgctatacgaagtgaattccaccatgacactaagttgcaacggcgaaacaaaatattttcgttgcgaagaaaaaaatggaaatacttcttggaatgatactgttacgtgtcctaatgcggaatgtcaacctcttcaattagaacacggatcgtgtcaaccagttaaagaaaaatactcatttggggaatatatgactatcaactgtgatgttggatatgaggttattggtgcttcgtacataagttgtacagctaattcttggaatgttattccatcatgtcaacaaaaatgtgatatgccgtctctatctaacggattaatttccggatctacattttctatcggtggcgttatacatcttagttgtaaaagtggttttacactaacggggtctccatcatccacatgtatcgacggtaaatggaatcccatactcccaatatgtgtacgaactaacgaaaaatttgatccagtggatgatggtcccgacgatgagacagatttgagcaaactctcgaaagacgttgtacaatatgaacaagaaatagaatcgttagaagcaacttatcatataatcatagtggcgttgacaattatgggcgtcatatttttaatctccgttatagtattagtttgttcctgtgacaaaaataatgaccaatataagttccataaattgctaccgtaaatataaatccgttaaaataattaataatttaataacaaacaagtatcaaaagattaaagacttatagctagaatcaattgagatgtcttcttcagtggatgttgatatctacgatgccgttagagcatttttactcaggcactattataacaagagatttattgtgtatggaagaagtaacgccatattacataatatatacaggctatttacaagatgcgccgttataccgttcgatgatatagtacgtactatgccaaatgaatcacgtgttaaacaatgggtgatggatacacttaatggtataatgatgaatgaacgcgatgtttctgtaagcgttggcaccggaatactattcatggaaatgtttttcgattacaataaaaatagtatcaacaatcaactaatgtatgatataattaatagcgtatctataattctagctaatgagagatatagaagcgcttttaacgacgatggtatatacatccgtagaaatatgattaacaagttgtacggatacgcatctctaactactattggcacgatcgctggaggtgtttgttattatctgttgatgcatctagttagtttgtataaataattatttcaatatactagttaaaattttaagattttaaatgtataaaaaactaataacgtttttatttgtaataggtgcattagcatcctattcgaataatgagtacactccgtttaataaactgagtgtaaaactctatatagatggagtagataatatagaaaattcatatactgatgataataatgaattggtgttaaattttaaagagtacacaatttctattattacagagtcatgcgacgtcggatttgattccatagatatagatgttataaacgactataaaattattgatatgtataccattgactcgtctactattcaacgcagaggtcacacgtgtagaatatctaccaaattatcatgccattatgataagtacccttatattcacaaatatgatggtgatgagcgacaatattctattactgcagagggaaaatgctataaaggaataaaatatgaaataagtatgatcaacgatgatactctattgagaaaacatactcttaaaattggatctacttatatatttgatcgtcatggacatagtaatacatattattcaaaatatgatttttaaaaatttaaaatatattatcacttcagtgacagtagtcaaataacaaacaacaccatgagatatattataattctcgcagttttgttcattaatagtatacatgctaaaataactagttataagtttgaatccgtcaattttgattccaaaattgaatggactggggatggtctatacaatatatcccttaaaaattatggcatcaagacgtggcaaacaatgtatacaaatgtaccagaaggaacatacgacatatccgcatttccaaagaatgatttcgtatctttctgggttaaatttgaacaaggcgattataaagtggaagagtattgtacgggactatgcgtcgaagtaaaaattggaccaccgactgtaacattgactgaatacgacgaccataaacagaaaaagtgtgcgtgacagcacagggagccacagaagggtttctcgaaaaaattactccatggagttcgaaagtatgtctgacacctaaaaagagtgtatatacatgcgcaattagatccaaagaagatgttcccaatttcaaggacaaaatggccagagttatcaagagaaaatttaatacacagtctcaatcttatttaactaaatttctcggtagcacatcaaatgatgttaccacttttcttagcatgcttaacttgactaaatattcataactaatttttattaatgatacaaaaacgaaataaaactgcatattatacactggttaacgcccttataggctctaaccattttcaagatgaggtccctgattatagtccttctgttcccctctatcatctactccatgtctattagacgatgtgagaagactgaagaggaaacatggggattgaaaatagggttgtgtataattgccaaagatttctatcccgaaagaactgattgcagtgttcatctcccaactgcaagtgaaggattgataactgaaggcaatggattcagggatatacgaaacaccgataaattataaaaaaagcaatgtgtccgctgtttccgttaataatactattttcgtaactggcggattattcataaataactctaatagcacgatcgtggttaacaatatggaaaaacttgacatttataaagacaaacaatggtcgattatagaaatgcctatggctagggtatatcacggcattgactcgacatttggaatgttatattttgccggaggtctatccgttaccgaacaatatggtaatttagagaaaaacaacgagatatcttgttacaatcctagaacgaataagtggtttgatatttcatatactatttataagatatccatatcatcattgtgtaaactaaataacgtcttctatgtatttagtaaggacattggatatgtggaaaagtatgatggtgcatggaagttagtacatgatcgtctccccgctataaaggcattatcaacttctccttattgattgaaaatataaatagtttttatgtatagcagtattaccctatagttttattgcttactactaacatggatacagatgttacaaatgtagaagatatcataaatgaaatagatagagagaaagaagaaatactaaaaaatgtagaaattgaaaataataaaaacattaacaagaatcatcccaatgaatatattagagaagcactcgttattaataccagtagtaatagtgattccattgataaagaagttatagaatgtatcagtcacgatgtaggaatatagatcatatctactaatttttataatcgatacaaaacataaaaaacaactcgttattacatagcaggcatggaatccttcaagtattgttttgataacgatggcaagaaatggattatcggaaatactttatattctggtaattcaatactctataaggtcagaaaaaatttcactagttcgttctacaattacgtaatgaagatagatcacaaatcacacaagccattgttgtctgaaatacgattctatatatctgtattggatcctttgactatcgacaactggacacgggaacgtggtataaagtatttggctattccagatctgtatggaattggagaaaccgatgattatatgttcttcgttataaagaattcgggaagagtattcgccccaaaggatactgaatcagtcttcgaagcatgcgtcactatgataaacacgttagagtttatacactctcgaggatttacccatggaaaaatagaaccgaggaatatactgattagaaataaacgtctttcactaattgactattctagaactaacaaactatacaagagtggaaactcacatatagattacaacgaggacatgataacttcaggaaatatcaattatatgtgtgtagacaatcatcttggagcaacagtttcaagacgaggagatttagaaatgttgggatattgcatgatagaatggttcggtggcaaacttccatggaaaaacgaaagtagtataaaagtaataaaacaaaaaaaagaatataaaaaatttatagctactttctttgaggactgttttcctgaaggaaatgaacctctggaattagttagatatatagaattagtatacacgttagattattctcaaactcctaattatgacagactacgtaaactgtttatacaagattgaaattatattcttttttttatagagtgtggtagtgttacggatatctaatattaatattagactatctctatcgcgctacacgaccaatatcgattactatggatatcttctatgaaaggagagaatgtatttatttctccagcgtcaatctcgtcagtattgacaatactgtattatggagctaatggatccactgctgaacagctatcaaaatatgtagaaacggaggagaacacggataaggttagcgctcagaatatctcattcaaatccatgaataaagtatatgggcgatattctgccgtgtttaaagattcctttttgagaaaaattggcgataagtttcaaactgttgacttcactgattgtcgcactatagatgcaatcaacaagtgtgtagatatctttactgaggggaaaatcaatccactattggatgaaccattgtctcctagcaattagtgccgtatactttaaagcaaaatggttgacgccattcgaaaaggaatttaccagtgattatcccttttacgtatctccgacggaaatggtagacgtaagtatgatgtctatgtacggcaaggcatttaatcacgcatctgtaaaagaatcattcggcaacttttcaatcatagaactgccatatgttggagatactagtatgatggtcattcttccagacaagattgatggattagaatccatagaacaaaatctaacagatacaaattttaagaaatggtgtgactttatggatgctatgtttatagatgttcacattcccaagtttaaggtaacaggctcgtataatctggtggatactctagtaaagtcaggactgacagaggtgttcggttcaactggagattatagcaatatgtgtaatttagatgtgagtgtcgacgctatgatccacaaaacgtatatagatgtcaatgaagagtatacagaagcagctgcagcaacttctgtactagtggcagactgtgcatcaacaattacaaatgagttctgtgcagatcatccgttcatctatgtgattaggcatgttgatggaaaaattcttttcgttggtagatattgctctccgacaactaattgttaaccattttttttaaaaaaaatagaaaaaacatgtggtattagtgcaggtcgttgttcttccaattgcaattggtaagatgacggccaactttagtacccacgtcttttcaccacagcactgtggatgtgacagactgaccagtattgatgacgtcaaacaatgtttgactgaatatatttattggtcgtcctatgcataccgcaacaggcaatgcgctggacaattgtattccacactcctctcttttagagatgatgcggaattagtgttcatcgacattcgcgagctggtaaaaaatatgccgtgggatgatgtcaaagattgtacagaaatcatccgttgttatataccggatgagcaaaaaaccatcagagagatttcggccatcatcggactttgtgcatatgctgctacttactggggaggtgaagaccatcccactagtaacagtctgaacgcattgtttgtgatgcttgagatgctaaattacgtggattataacatcatattccggcgtatgaattgatgagttgtacatcttgacattttctttcttctcttctccctttcttctcttctcccttcctccctcttctccctttcccagaaacaaacttttttacccactataaaataaaatgagtatactacctgttatatttctttctatatttttttattcttcattcgttcagacttttaacgcgtctgaatgtatcgacaaagggcaatattttgcatcattcatggagttagaaaacgagccagtaatcttaccatgtcctcaaataaatacgctatcatccggatataatatattagatattttatgggaaaaacgaggagcggataatgatagaattataccgatagataatggtagcaatatgctaattctgaacccgacacaatcagactctggtatttatatatgcattaccacgaacgaaacctactgtgacatgatgtcgttaaatttgacaatcgtgtctgtctcagaatcaaatatagattttatctcgtatccacaaatagtaaatgagagatctactggcgaaatggtatgtcccaatattaatgcatttattgctagtaacgtaaacgcagatattatatggagcggacatcgacgccttagaaataagagacttaaacaacggacacctggaattattaccatagaagatgttagaaaaaatgatgctggttattatacatgtgttttagaatatatatacggtggcaaaacatataacgtaaccagaattgtaaaattagaggtacgggataaaataataccttctactatgcaattaccagatggcattgtaacttcaataggtagtaatttgactattgcatcgttgagacctcccacaacggatgcagacgtcttttggataagtaatggtatgtattacgaagaagatgatggggacggaaacggtagaataagtgtagcaaataaaatctatatgaccgataagagacgtgttattacatcccggttaaacattaatcctgtcaaggaagaagatgctacaacgtttacgtgtatggcgtttactattcctagcatcagcaaaacagttactgttagtataacgtgaatgtatgttgttacatttccatgtcaattgagtttataagaatttttatacattatcttccaacaaacaattgacgaacgtattgctatgattaactcccacgatactatgcatattattaatcattaacttgcagactatacctagtgctattttgacatactcatgttcttgtgtaattgcggtatctatattattaaagtacgtaaatctagctatagttttattatttaattttagataatataccgtctccttatttttaaaaattgccacatcctttattaaatcatgaatgggaatttctatgtcatcgttagtatattgtgaacaacaagagcagatatctataggaaagggtggaatgcgatacattgatctatgtagttttaaaacacacgcgaactttgaagaatttatataaatcattccatcgatacatccttctatgttgagatgtatatatccaggaattcgtttattaatatcgggaaatgtataaactaaaacattgcccgaaagcggtgcctctatctgcgttatatccgttcttaacttacaaaatgtaaccaatacctttgcatgacttgttttgttcggcaacgttagtttaaacttgacgaatggattaattacaatagcatgatccgcgcatctattaagtttttttactttaacgcccttgtatgtttttacagagactttatctaaatttctagtgcttgtatgtgttataaatataacgggatatagaaccgaatcacctaccttagatacccaattacattttatcagatccagataataaacaaattttgtcgccctaactaattctatattgttatatattttacaattggttatgatatcatgtaataacttggagtctaacgcgcatcgtcgtacgtttatacaattgtgatttagtgtagtatatctacacatgtatttttccgcactatagtattctggactagtgataaaactatcgttatatctatcttcaatgaactcatcgagatattgctctctgtcatattcatacacctgcataaactttctagacatcttacaatccgtgttattttaggatcatatttacatatttacgggtatatcaaagatgttagattagttaatgggaatcgtctataataatgaatattaaacaattatatgaggacttttaccacaaagcatcataaaaatgagtcgtcgtctgatttatgttttaaatatcaaccgcaaatcaactcataaaatacaagagaatgaaatatatacatattttagtcattgcaatatagaccatacttctacagaacttgattttgtagttaaaaactatgatctaaacagacgacaacctgtaactgggtatactgcactacactgctatttgtataataattactttacaaacgatgtactgaagatattattaaatcatggagtggatgtaacgatgaaaaccagtagcggacgtatgcctgtttatatattgcttactagatgttgtaatatttcacatgatgtagtgatagatatgatagacaaagataaaaaccacttattacatagagactattccaacctattactagagtatataaaatctcgttacatgttattaaaggaagaggatatcgatgagaacatagtatccactttattagataagggaatcgatcctaactttaaacaagacggatatacagcgttacattattattatttgtgtctcgcacacgtttataaaccaggtgagtgtagaaaaccgataacgataaaaaaggccaagcgaattatttctttgtttatacaacatggagctaatctaaacgcgttagataattgtggtaatacaccattccatttgtatcttagtattgaaatgtgtaataatattcatatgactaaaatgctgttgacttttaatccgaatttcgaaatatgtaataatcatggattaacgcctatactatgttatataacttccgactacatacaacacgatattcttgttatgttaatacatcactatgaaacaaatgttggagaaatgccgatagatgagcgtcgtatgatcgtattcgagtttatcaaaacatattctacacgtccggcagattcgataacttatttgatgaataggtttaaaaatataaatatttatacccgctatgaaggaaagacattattacacgtagcatgtgaatataataatacacacgtaatagattatcttatacgtatcaacggagatataaatgcgttaaccgacaataacaaacacgctacacaactcattatagataacaaagaaaattccccatataccattaattgtttactgtatatacttagatatattgtagataagaatgtgataagatcgttggtggatcaacttccatctctacctatcttcgatataaaatcatttgagaaattcatatcctactgtatacttttagatgacacattttacgataggcacgttaagaatcgcgattctaaaacgtatcgatacgcattttcaaaatacatgtcgtttgataaatacgatggtataataactaaatgtcacgacgaaacaatgttactcaaactgtccactgttctagacactacactatatgcagttttaagatgtcataattcgagaaagttaagaagatacctcaacgagttaaaaaaatataataacgataagtcctttaaaatatattctaatattatgaatgagagataccttaatgtatattataaagatatgtacgtgtcaaaggtatatgataaactatttcctgttttcacagataaaaattgtctactaacattactaccttcagaaattatatacgaaatattatacatgctgacaattaacgatctttataatatatcgtatccacctaccaaagtatagttgtatttttctcatgcgatgtgtgtaaaaaaactgatattatataaatattttagtgccgtataataaagatgacgatgaaaatgatggtacatatatatttcgtatcattattgttattgctattccacagttacgccatagacatcgaaaatgaaatcacagaattcttcaataaaatgagagatactctaccagctaaagactctaaatggttgaatccagcatgtatgttcggaggcacaatgaatgatatagccgctctaggagagccattcagcgcaaagtgtcctcctattgaagacagtcttttatcgcacagatataaagactatgtggttaaatgggagaggctagaaaagaatagacggcgacaggtttctaataaacgtgttaaacatggtgatttatggatagccaactatacatctaaattcagtaaccgtaggtatttgtgcaccgtaactacaaagaatggtgactgtgttcagggtatagttagatctcatattaaaaaacctccttcatgcattccaaaaacatatgaactaggtactcatgataagtatggcatagacttatactgtggaattctttacgcaaaacattataataatataacttggtataaagataataaggaaattaatatcgacgacattaagtattcacaaacgggaaaggaattaattattcataatccagagttagaagatagcggaagatacgactgttacgttcattacgacgacgttagaatcaagaatgatatcgtagtatcaagatgtaaaatacttacggttataccgtcacaagaccacaggtttaaactaatactagatccgaaaatcaacgtaacgataggagaacctgccaatataacatgcactgctgtgtcaacgtcattattgatcgacgatgtactgattgaatgggaaaatccatccggatggcttataggattcgattttgatgtatactctgttttaactagtagaggcggtatcaccgaggcgaccttgtactttgaaaatgttactgaagaatatataggtaatacatataaatgtcgtggacacaactattattttgaaaaaacccttacaactacagtagtattggagtaaatatacaatgcatttttatatacattactgaattattattactgaattattattactgaattattattaattatatcgtatttgtgctatagaatggatgaagatacgcgactatctaggtatttgtatctcaccgatagagaacatataaatgtagactctattaaacagttgtgtaaaatatcagatcctaatgcatgttatagatgtggatgtacggctttacatgagtacttttataattatagatcagtcaacggaaaatacaagtatagatacaacggttactatcaatattattcatctagcgattatgaaaattataatgaatattattatgatagaactggtatgaacagtgagagtgataatatatcaatcaaaacagaatatgaattctatgatgaaacacaagatcaaagtacacaactagtaggttacgacattaaactcaaaaccaatgaggatgattttatggctatgatagatcagtgggtgtccatgattatatagatgaatcaattaataaagtagtatatggaagagagtctcacgtaagatggcgggatatatggcaagaacataatgatggcgtatacagtataggaaaggagtgcatagataatatatacgaagacaaccataccgtagacgaattctacaagatagacagcgtatcagatgtagatgacgcggaacacatatctccgataactaaaaaaccatagaatcagttgatgataatacctacatttctaatcttccgtataccatcaaatacaaaatattcgagcaacaataagtattttttatacctttaaaactgataaataaattttttctagtgatattttggcaagatgagaatcctatttctcatcgctttcatgtatgggtgtgttcactcatatgttaacgcggttgaaaccaaatgtccaaatctagacattgtaacatcttctggagaatttcattgttcaggatgtgtggaacatatgcctgagtttagctatatgtattggttggcaaaggatatgaaatcggacgaggataccaagtttatagaacatctgggtgatggcatcaaagaagatgaaaccgttcgtaccacagatagtggaatcgtcactctacgtaaagtccttcatgtaaccgatactaataaatttgataattataggttcacttgtgtcctcactacgatagatggcgtttcaaaaaagaatatttggctgaagtagtgcgtgctactatttttatttatgatataatctaatggaattaatttgaattgatatttatccaatactaaagattatattagaatcaaattaatcttttatacgagaaaaaataacgacatacgtcgtcaacaaattaaactttttatttattagttaactagcttatagaacttgctcattgttatgtttctaaaacgggtacggcatataggacaattatccgacgcaccggtttctcttcgtgttctatgccatatattgatgcatgttatgcaaaatatatgagtacacgaatccaataaaccaaagtatctatcgttttgagtaaacaacttcatagcaaattccacattctttttctttacttactctatacacgtcctcgtatttatttagtattttgatgatatccaactcagaaatggttgttgtattattgggtgtataggtattattagctatgtaccaatttaccaaccctcttaatattgattgataatcacatcggttatccaatcaataaccacattaataactaaattgtagtgtatatatagaccatatatgtttctatttttttgacagttacgtatagtttcagtaagttttgattgttgtattcctgtatctctagataagttagtcatatagtcccttccggcgatacgttttttccaagcccgaaattgattagccaaatgtgtatttatttttgtgatattgatataatatttcggataatgcatactgttagtcttatatcatttggttcatctatgtattgtaatattgttacatgatctatagatgatgtattgattttggcaggatcgaattccatatccgcgactaaacagtgaaaaaaatgtaaatactttttaaattttaaattagtaaaacttttttttattttttatgattccaaaaatactgaatacaaagtcctaaattataaatatggagatcatactaccacaacttattattatgtatacaaggccggtgtaatagatagatatatataattctattacaccggcagacaattaccgaccggtatttgtcgttaccaacataccgtataatatgtaatatacaattccataacccattgacagttgttatacatcaaaattgcaattcttttgattacgatgttataagaatgtagttaattgatgtatgatgttaatgtgtcctctttcctcttataacatcgtaatcaaaaacttttttataatatatacctaataatgtgtcttaatagttctcgtgattcgtcaaacaatcattcttataaaatataataaagcaacgtaaaaacacataaaaataagcgtaactaataagacaatggatatttacgacgataaaggtctacagactattaaactgtttaataatgaatttgattgtataaggaatgacatcagagaattatttaaacatgtaactgattccgatagtatacaacttccgatggaagacaattctgatattatagaaaatatcagaaaaatactatatagacgattaaaaaatgtagaatgtgttgacatcgataacacaataacttttatgaaatacgatccaaatgatgataataagcgtacgtgttctaattgggtacccttaactaataactatatggaatattgtctagtaatatatttggaaacaccgatatgtggaggcaaaataaaattataccaccctacaggaaatataaagtcggataaggatattatgtttgcaaagactctagactaagatagacagcgtatcagatgtagatgacgcggaacacatatctcctataactaatgatgtatctacacaaacatgggaaaagaaatcagagttagatagatacatggaatcgtatcctcgtcatagatatagtaaacattctgtatttaagggattttctgataaagttagaaaaaatgatttagacatgaatgtggtaaaagaattactttctaacggtgcatctctaacaatcaaggatagcagtaataaggatccaattgctgtttattttagaagaacgataatgaatttagaaatgattgatattattaacaaacatacaactattgatgaacgaaagtatatagtacactcctatctaaaaaattatagaaatttcgattatccatttttcaggaagttagttttgactaataaacattgtctcaacaattattataatataagcgacagcaaatatggaacaccgctacatatattggcgtctaataaaaaattaataactcctaattacatgaagttattagtgtataacggaaatgatataaacgcacgaggtgaagatacacaaatgcgaaccaactcagaaatggttgttgtattattgggtgtataggtattattagctatgtaccaatttaccaaccctcttaatattgattgataatcacatcggttatccaattaataactaaattgtagtgtatatatagaccatatatgtttctatttttttgacagttacgtatagtttcagtaagttttgattgttgtattcctgtatctctagataagttagtcatatagtcccttccggcgatacgttttttccaagcccgaaattgattagccaaatgtgtatttatttttgtgatattgatataatatttcggataatgcatactgttagtcttatatcatttggttcatctatgtattgtaatattgttacatgatctatagatgatgtattgattttggcaggatcgaattccatatccgcgactaaacagtgaaaaaaatgtaaatactttttaaattttaaattagtaaaacttttttttattttttatgattccaaaaatactgaatacaaagtcctaaattataaatatggagatcatactaccacaacttattattatgtatacaaggccggtgtaatagatagatatatataattctattacaccggcagacaattaccgaccggtatttgtcgttaccaacataccgtataatatgtaatatacaattccataacccattgacagttgttatacatcaaaattgcaattcttttgattacgatgttataagaatgtagttaattgatgtatgatgttaatgtgtcctctttcctcttataacatcgtaatcaaaaacttttttataatatatacctaataatgtgtcttaatagttctcgtgattcgtcaaacaatcattcttataaaatataataaagcaacgtaaaaacacataaaaataagcgtaactaataagacaatggatatttacgacgataaaggtctacagactattaaactgtttaataatgaatttgattgtataaggaatgacatcagagaattatttaaacatgtaactgattccgatagtatacaacttccgatggaagacaattctgatattatagaaaatatcagaaaaatactatatagacgattaaaaaatgtagaatgtgttgacatcgataacacaataacttttatgaaatacgatccaaatgatgataataagcgtacgtgttctaattgggtacccttaactaataactatatggaatattgtctagtaatatatttggaaacaccgatatgtggaggcaaaataaaattataccaccctacaggaaatataaagtcggataaggatattatgtttgcaaagactctagactttaaatcaacgaaagtgttaactggacgtaaaacaattgccgttctagacatatccgtttcatataatagatcaatgactactattcactacaacgacgacgttgatatagatatacatactgataaaaatggaaaagagttatgttattgttatataacaatagatgatcattacttggttgatgtggaaactataggagttatagtcaatagatctggaaaatgtctgttagtaaataaccatctaggtataggtatcgttaaagataaacgtataagcgatagttttggagatgtatgtatggatacaatatttgacttttctgaagcacgagagttattttcattaactaatgatgataacaggaatatagcatgggacactgataaactagacgatgatacagatatatggactcccgtcacagaagatgattacaaatttctttctagactagtattgtatgcaaaatctcaatcggatactgtatttgactattatgttcttactggtgatacggaaccacccactgtattcattttcaaggtaactagattttactttaatatgccgaaataaaaaatttttgtataatatctagaggtagaggtattgtttagataaatacaaataacatagatacatcgcatacttagcatttttataaatatacataagacatacactttatacatttttgtaaaaatactcataaaaaaatttataaaaattatggcacaaccatatcttgtataggtagtttagttcgtcgagtgaacctataaacagataatagacaacacataataatgcctactaatacaagcataataccgggagatgggatatatgacgttgtagtgtttgggttttctgaacgttgatagtctactaatactacatgctgacatctaatgcctgtataaccatgagagcatctacaatacataccgtcaatatctctagcgtggatacagtcaccgtgtaaacaatatccatctccctctggaccgcataatctgatagctggaatatctgttgtagcgtttgtaatttctggcaatgtcgtttcgatagcgttaccactatcggcgaatgatctgattatcatagcagcgaacaacaacatcagataatttatcaacatttttgatggattctgtgtttatgctgtttctcagtgtgtgtttatgacaagattgggaattttatattattaattcagtaatataaactaataatatattgttaattgtgtaaataatataaaaataacaatacaatattgaatgtgttgctgttaaaaatgtatgtgttaatataatagaataaaataaatgagtatgatcattttagataacgattgattttatcattaccgcttcattcttatattctttgcttacggaacctatatttagaaacatctactaacaattttttatgcttgcattattaatggtatgtaatatgattgattgtgtacgcaataccaatttgttaagtatgaatacggggtacaaacataaattgaaatttaacattatttatttatgatatatatcgttatcgttaggtctataccatggatatctttaaagaactaatcttaaaacaccctgatgaaaatgttttgatttctccagtttccattttatctactttatctattctaaatcatggagcagctggttctacagctgaacaactatcaaaatatatagagaatatgaatgagaatacacccgatgacaataatgatgacatggaggtagatattccgtattgtgcgacactagctaccgcaaataaaatatacggtagcgatagtatcgagttccacgcctccttcctacaaaaaataaaagacgattttcaaactgtaaactttaataatgctaaccaaacaaaggaactaatcaacgaatgggttaagacaatgacaaatggtaaaattaattccttattgactagtccgctatccattaatactcgtatgacagttgttagcgccgtccattttaaagcaatgtggaaatatccattttctaaacatcttacatatacagacaagttttatatttctaagaatatagttaccagcgttgatatgatggtgggtaccgagaataacttgcaatatgtacatattaatgaattattcggaggattctctattatcgatattccatacgagggaaactctagtatggtaattatactaccggacgacatagaaggtatatataacatagaaaaaaatataacagatgaaaaatttaaaaaatggtgtggtatgttatctactaaaagtatagacttgtatatgccaaagtttaaagtggaaatgacagaaccgtataatctggtaccgattttagaaaatttaggacttactaatatattcggatattatgcagattttagcaagatgtgtaatgaaactatcactgtagaaaaatttctacatacgacgtttatagatgttaatgaggagtatacagaagcatcggccgttacaggagtatttacgattaacttttcgatggtatatcgtacgaaggtctacataaaccatccattcatgtacatgattaaagacaccacaggacgtatactttttatagggaaatactgctatccgcaataaatataaacaaatagacttttataaagagtcttcaacgataagtatatcgacatactacttatgctgcgaaagattctgaacgagaacgactatctcaccctcttggatcatatccgcactgctaaatactaaatctccactacactttttatcatcttatgaggaatgattgccttcgtgaaataggaataattagcaccagaatagctatggattattgtggtagagagtgcactattctatgtcgtctactggatgaagatgtgacgtacaaaaaaataaaactagaaattgaaacgtgtcacaacttatcaaaacatatagatagacgaggaaacaatgcgctacattgttacgtctccaataaatgcgatacagacattaagattgttctctcgcggagtcgagagactttgtagaaacaacgaaggattaactccgctaggagtatacagtaagcatagatacgtaaaatctcagattgtgcatctactgatatccagctattcaaattcctctaacgaactcaagtcgaatataaatgatttcgatctgtattcggataatatcgacttacgtctgctaaaatacctaattgtggataaacggatacgtccgtccaagaatacgaattatgcaatcaatggtctcggattggtggatatatacgtaacgacgcctaatccgagaccagaagtattgctatggcttcttaaatcagaatgttacagcaccggttacgtatttcgtacctgtatgtacgacagtgatatgtgtaagaactctcttcattactatatatcgtctcatagagaatctcaatctctatccaaggatgtaattaaatgtttgatcgataacaatgtttccatccatggcagagacgaaggaggatctttacccatccaatactactggtctttctcaaccatagatatagagattgttaaattattattaataaaggatgtggacacgtgtagagtatacgacgtcagccctatattagaggcgtattatctaaacaagcgatttagagtaaccccatataatgtagacatggaaatcgttaatcttcttattgagagacgtcatactcttgtcgacgtaatgcgtagtattacttcgtacgattccagagaatataaccactacatcatcgataacattctaaagagatttagacaacaggatgtacaagccatgttgataaactacttacattacggcgatatggtcgttcgatgcatgttagataacggacaacaactatcctctgcacgactactttgttaataataatctcgtcgatgtaaacgtcgtaaggtttatcgtggaaaatatggacacgcggctgtaaatcacgtatcgaacaatggccgtctatgtatgtacggtctgatattatcgagatttaataattgcgggtatcactgttatgaaaccatactgatagatgtatttgatatactaagcaagtacatggatgatatagatatgatcgataactctactatattacgcggtcgatgtcaataatatacaatttgcaaagcggttattggaatatggagcgagtgtcacgctcgataatcaatacggccatccagaaaagcagttaccaaagagaaaacaaaacgaagctagttgatttattactgagttaccatcccactctagagactatgattgacgcatttaatagagatatacgctatctatatcctgaaccattattcgcctgtatcagatacgccttaatcctagatgatgattttccttctaaagtaaagtatgatatcgccggtcgtcataaggaactaaagcgctatagagtagacattaatagaatgaagaatgtctacatatcaggcgtctccatgtttgatatattatttaaacgaagcaaacgccacaaattgagatacgcaaagaatccgacatcaaatggtacaaaaaagaactaacgtccatcattacagaaactgtaaagaacaatgagaggatcgactccatagtggacaacattaatacagacgataacttgatttcgaaattacccatggagatactttattactccattaaataatttatcatggagcgataatgtcctgtttcatttgtttccatgacatattacaaaatcgattccgtccaagatgataaaaacatttaccggcatcataaacacggagtttattttatatgtctcgcataaacattactaaaaaaatatattgtcgataacttgatttcgaaattacccatggagatactttattactccattaaataatttatcatggagcgataatgtcctgtttcatttgtttccatgacatattacaaaatcgattccgtccaagatgataaaaacatttaccggcatcataaacacggagtttattttatatgtctcgcataaacattactaaaaaaatatattgttctgtttttctttcacatctttaattatgaaaaagtaaatcattatgagatggacgagattgtacgcatcgttcgcgacagtatgtggtacatacctaacgtatttatggacgacggtaagaatgaaggtcacgtttctgtcaacaatgtctgtcatatgtattttacgttctttgatgtggatacatcgtctcatctgtttaagctagttattaaacactgcgatctgaataaacgaggtaactctccattacattgctatacgatgaatacacgatttaatccatctgtattaaagatattgttacaccacggcatgcgtaactttgatagcaaggatgaccactatcaatcgataacaagatctttgatatactaacggacaccattgatgactttagtaaatcatccgatctattgctgtgttatcttagatataaattcaatgggagcttaaactattacgttctgtacaaaggatccgaccctaattgcgccgacgaggatgaactcacttctcttcattactactgtaaacacatatccacgttctacgaaagcaattattacaagttaagtcacactaagatgcgagccgagaagcgattcatctacgcgataatagattatggagcaaacattaacgcggttacacacttaccttcaacagtataccaaacatagtcctcgtgtggtgtatgctcttttatctcgaggagccgatacgaggatacgtaataatcttgattgtacacccatcatggaacgattgtgcaacaggtcatattctcataatgttactcaattggcacgaacaaaaggaagaaggacaacatctactttatctattcataaaacataatcaaggatacactctcaatatactacggtatctattagataggttcgacattcagaaagacgaatactataataccgcctttcaaaattgtaacaacaatgttgcctcatacatcggatacgacatcaaccttccgactaaagacggtattcgacttggtgtttgaaaacagaaacatcatatacaaggcggatgttgtgaatgacatcatccaccacagactgaaagtatctctacctatgattaaatcgttgttctacaagatgtctctccctacgacgattactacgtaaaaaagatactagcctactgcctattaagggacgagtcattcgcggaactacatagtaaattctgtttaaacgaggactataaaagtgtatttatgaaaaatatatcattcgataagatagattccatcatcgtgacataagtcgcctcaaagagattcgaatctccgacaccgacctgtatacggtatcacagctatcttaaagccatacattcagacagtcacatttcatttcccatgtacgacgatctcatagaacagtgccatctatcgatggagcgtaaaagtaaactcgtcgacaaagcactcaataaattagagtctaccatcggtcaatctagactatcgtatttgcctccggaaattatgcgcaatatcatctaaacagtatgttgtacggaaagaaccattacaaatattatccatgatagaaagaaaatatctatatgattggagaagtaggaaacaggaacaagacaacgattactacattattaaatcatgaagtccgtattatactcgtatatattgtttctctcatgtataataataaacggaagagatatagcaccgcatgcaccatccgatggaaagtgtaaagacaacgaatacaaacgccataatttgtgtccgggaacatacgcttccagattatgcgatagcaagactaacacacgatgtacgccgtgtggttcgggtaccttcacatctcgcaataatcatttacccgcttgtctaagttgtaacggaagacgcgatcgtgtaacacgactcacaatagaatctgtgaatgctctcccggatattattgtcttctcaaaggatcatccggatgcaaggcatgtgtttcccaaacaaaatgtggaataggatacggagtatccggagacgtcatctgttctccgtgtggtctcggaacatattctcacaccgtctcttccgcagataaatgcgaacccgtacccagaaatacgtttaactatatcgatgtggaaattaacctgtatccagttaacgacacgtcgtgtactcggacgaccactaccggtctcagcgaatccatctcaacgtcggaactaactattactatgaatcataaagactgtaatcccgtatttcgtgatggatacttctccgttcttaataaggtagcgacttcaggtttctttacaggagaaaggtgtgcactctgaatttcgagattaaatgcaataacaaagattcttcctccaaacagttaacgaaagcaaagaatgatactatcatgccgcattcggagacagtaactctagtgggcgacatctatatactatatagtaataccaatactcaagactacgaaactgatacaatctcttatcatgtgggtaatgttctcgatgtcgatagccatatgcccggtagttgcgatatacataaactgatcactaattccaaacccacccactttttatagtaagtttttcacccataaataataaatacaataattaatttctcgtaaaagtagaaaatatattctaatttattgcacggtaaggaagtagaatcataaagaacagtactcaatcaatagcaattatgaaacaatatatcgtcctggcatgcatgtgcctggcggcagctgctatgcctgccagtcttcagcaatcatcctcatcctcctcctcgtgtacggaagaagaaaacaaacatcatatgggaatcgatgttattatcaaagtcacaaagcaagaccaaacaccgaccaatgataagatttgccaatccgtaacggaaattacagagtccgagtcagatccagatcccgaggtggaatcagaagatgattccacatcagtcgaggatgtagatcctcctaccacttattactccatcatcggtggaggtctgagaatgaactttggattcaccaaatgtcctcagattaaatccatctcagaatccgctgatggaaacacagtgaatgctagattgtccagcgtgtccccaggacaaggtaaggactctcccgcgatcactcatgaagaagctcttgctatgatcaaagactgtgaagtgtctatcgacatcagatgtagcgaagaagagaaagacagcgacatcaagacccatccagtactcgggtctaacatctctcataagaaagtgagttacgaagatatcatcggttcaacgatcgtcgatacaaaatgcgtcaagaatctagagtttagcgttcgtatcggagacatgtgcaaggaatcatctgaacttgaggtcaaggatggattcaagtatgtcgacggatcggcatctgaaggtgcaaccgatgatacttcactcatcgattcaacaaaactcaaagcgtgtgtctgaatcgataactctattcatctgaaattggatgagtagggttaatcgaacgattcaggcacaccacgaattaaaaaagtgtaccggacactatattccggtttgcaaaacaaaaatgttcttaactacattcacaaaaagttacctctcgcgacttcttctttttctgtctcaatagtgtgatacgattatgacactattcctattcctattcctatttcctttcagagtatcacaaaaatattaaacctctttctgatggtctcataaaaaaagttttacaaaaatatttttattctctttctctctttgatggtctcataaaaaaagttttacaaaaatatttttattctctttctctctttgatggtctcataaaaaaagttttacaaaaatatttttattctctttctctctttgatggtctcataaaaaaagttttacaaaaatatttttattctctttctctctttgatggtctcataaaaaaagttttacaaaaatatttttattctctttctctctttgatggtctcataaaaaaagttttacaaaaatatttttattctctttctctctttgatggtctcataaaaaaagttttacaaaaatatttttattctctttctctctttgatggtctcataaaaaaagttttacaaaaatatttttattctctttctctctttgatggtctcataaaaaaagttttacaaaaatatttttattctctttctctctttgatggtctcataaaaaaagttttacaaaaatatttttattctctttctctctttgatggtctcataaaaaaagttttacaaaaatatttttattctctttctctctttgatggtctcataaaaaaagttttacaaaaatatttttattctctttctctctttgatggtctcataaaaaaagttttacaaaaatatttttattctctttctctctttgatggtctcataaaaaaagttttacaaaaatatttttatt

SEQ ID NO: 2 - DNA, 190167 bp, Vaccinia virus
  LIVP parental genome
ttatgagaccatcaaagagagaaagagaataaaaatatttttgtaaaactttttttatgagaccatcaaagagagaaagagaataaaaatatttttgtaaaacttttttatgagaccatcaaagagagaaagagaataaaaatatttttgtaaaacttttttatgagaccatcaaagagagaaagagaataaaaatatttttgtaaaactttttttatgagaccatcaaagagagaaagagaataaaaatatttttgtaaaactttttttatgagaccatcaaagagagaaagagaataaaaatatttttgtaaaactttttttatgagaccatcaaagagagaaagagaataaaaatatttttgtaaaactttttttatgagaccatcaaagagagaaagagaataaaaatatttttgtaaaactttttttatgagaccatcaaagagagaaagagaataaaaatatttttgtaaaactttttttatgagaccatcaaagagagaaagagaataaaaatatttttgtaaaactttttttatgagaccatcaaagagagaaagagaataaaaatatttttgtaaaactttttttatgagaccatcaaagagagaaagagaataaaaatatttttgtaaaactttttttatgagaccatcaaagagagaaagagaataaaaatatttttgtaaaactttttttatgagaccatcaaagagagaaagagaataaaaatatttttgtaaaactttttttatgagaccatcaaagagagaaagagaataaaaatatttttgtaaaactttttttatgagaccatcagaaagaggtttaatatttttgtgatactctgaaaggaaataggaataggaataggaatagtgtcataatcgtatcacactattgagacagaaaaagaagaagtcgcgagaggtaactttttgtgaatgtagttaagaacatttttgttttgcaaaccggaatatagtgtccggtacacttttttaattcgtggtgtgcctgaatcgttcgattaaccctactcatccaatttcagatgaatagagttatcgattcagacacacgctttgagttttgttgaatcgatgagtgaagtatcatcggttgcaccttcagatgccgatccgtcgacatacttgaatccatccttgacctcaagttcagatgattccttgcacatgtctccgatacgaacgctaaactctagattcttgacgcattttgtatcgacgatcgttgaaccgatgatatcttcgtaactcactttcttatgagagatgttagacccgagtactggatgggtcttgatgtcgctgtctttctcttcttcgctacatctgatgtcgatagacacttcacagtctttgatcatagcaagagcttcttcatgagtgatcgcgggagagtccttaccttgtcctggggacacgctggacaatctagcattcactgtgtttccatcagcggattctgagatggatttaatctgaggacatttggtgaatccaaagttcattctcagacctccaccgatgatggagtaataagtggtaggaggatctacatcctcgactgatgtggaatcatcttctgattccacctcgggatctggatctgactcggactctgtaatttccgttacggattggcaaatcttatcattggtcggtgtttggtcttgctttgtgactttgataataacatcgattcccatatgatgtttgttttcttcttccgtacacgaggaggaggatgaggatgattgctgaagactggcaggcatagcagctgccgccaggcacatgcatgccaggacgatatattgtttcataattgctattgattgagtactgttctttatgattctacttccttaccgtgcaataaattagaatatattttctacttttacgagaaattaattattgtatttattatttatgggtgaaaaacttactataaaaagtgggtgggtttggaattagtgatcagtttatgtatatcgcaactaccgggcatatggctatcgacatcgagaacattacccacatgataagagattgtatcagtttcgtagtcttgagtattggtattactatatagtatatagatgtcgcccactagagttactgtctccgaatgcggcatgatagtatcattctttgctttcgttaactgtttggaggaagaatctttgttattgcatttaatctcgaaattcagagtgcacacctttctcctgtaaagaaacctgaagtcgctaccttattaagaacggagaagtatccatcacgaaatacgggattacagtctttatgattcatagtaatagttagttccgacgttgagatggattcgctgagaccggtagtggtcgtccgagtacacgacgtgtcgttaactggatacaggttaatttccacatcgatatagttaaacgtatttctgggtacgggttcgcatttatctgcggaagagacggtgtgagaatatgttccgagaccacacggagaacagatgacgtctccggatactccgtatcctattccacattttgtttgggaaacacatgccttgcatccggatgatcctttgagaagacaataatatccgggagagcattcacagattctattgtgagtcgtgttacacgatcgcgtcttccgttacaacttagacaagcgggtaaatgattattgcgagatgtgaaggtacccgaaccacacggcgtacatcgtgtgttagtcttgctatcgcataatctggaagcgtatgttcccggacacaaattatggcgtttgtattcgttgtctttacactttccatcggatggtgcatgcggtgctatatctcttccgtttattattatacatgagagaaacaatatatacgagtataatacggacttcatgatttaataatgtagtaatcgttgtcttgttcctgtttcctacttctccaatcatatagatattttctttctatcatggataatatttgtaatggttctttccgtacaacatactgtttagatgatattgcgcataatttccggaggcaaatacgatagtctagattgaccgatggtagactctaatttattgagtgctttgtcgacgagtttacttttacgctccatcgatagatggcactgttctatgagatcgtcgtacatgggaaatgaaatgtgactgtctgaatgtatggctttaagatagctgtgataccgtatacaggtcggtgtcggagattcgaatctctttgaggcgacttatgtcacgatgatggaatctatcttatcgaatgatatatttttcataaatacacttttatagtcctcgtttaaacagaatttactatgtagttccgcgaatgactcgtcccttaataggcagtaggctagtatcttttttacgtagtaatcgtcgtagggagagacatcttgtagaacaacgatttcgttttgttttctcttctgtaactgcttttctggatggccgtattgattatcgagcgtgatactcgctccatattccaataaccgctttgcaaattgtatattattgacatcgaccgcgtaatatagtagagttatcgatcatatctatatcatccatgtacttgcttagtatatcaaatacatctatcagtatggtttcataacagtgatacccgcaattattaaatctcgataatatcagaccgtacatacatagacggccattgttcgatacgtgatttacagccgcgtgtccatattttccacgataaaccttacgacgtttacatcgacgagattattattaacaaagtagtcgtgtagaggatagttgttgtccgttatctaacatgcatcgaacgaccatatcgccgtaatgtaagtagtttatcagtatggcttgtacgatggattcatcctgttgtctaaatctctttagaatgttatcgatgatgtagtggttatattctctggaatcgtacgaagtaatactacgcattacgtcgacaagagtatgacgtctctcaataagaagattaacgatttccatgtctacattatatggggttactctaaatcgcttgtttagataatacgcctctaatatagggctgacgtcgtatactctacacgtgtccacatcctttattaataataatttaacaatctctatatctatggttgagaaagaccagtagtattggatgggtaaagatcctccttcgtctctgccatggatggaaacattgttatcgatcaaacatttaattacatccttggatagagattgagattctctatgagacgatatatagtaatgaagagagttcttacacatatcactgtcgtacatacaggtacgaaatacgtaaccggtgctgtaacattctgatttaagaagccatagcaatacttctggtctcggattaggcgtcgttacgtatatatccaccaatccgagaccattgattgcataattcgtattcttggacggacgtatccgtttatccacaattaggtattttagcagacgtaagtcgatattatccgaatacagatcgaaatcatttatattcgacttgagttcgttagaggaatttgaatagctggatatcagtagatgcacaatctgagattttacgtatctatgcttactgtatactcctagcggagttaatccttcgttgtttctacaaagtctctcgactccgcgagagaacaatcttaatgtctgtatcgcatttattggagacgtaacaatgtagcgcattgtttcctcgtctatctatatgttttgataagttgtgacacgtttcaatttctagttttatttttttgtacgtcacatcttcatccagtagacgacatagaatagtgcactctctaccacaataatccatagctattctggtgctaattattcctatttcacgaaggcaatcattcctcataagatgataaaaagtgtagtggagatttagtatttagcagtgcggatatgatccaagagggtgagatagtcgttctcgttcagaatctttcgcagcataagtagtatgtcgatatacttatcgttgaagactctttataaaagtctatttgtttatatttattgcggatagcagtatttccctataaaaagtatacgtcctgtggtgtctttaatcatgtacatgaatggatggtttatgtagaccttcgtacgatataccatcgaaaagttaatcgtaaatactcctgtaacggccgatgcttctgtatactcctcattaacatctataaacgtcgtatgtagaaatttttctacagtgatagtttcattacacatcttgctaaaatctgcataatatccgaatatattagtaagtcctaaattttctaaaatcggtaccagattatacggttctgtcatttccactttaaactttggcatatacaagtctatacttttagtagataacataccacaccattttttaaatttttcatctgttatatttttttctatgttatatataccttctatgtcgtccggtagtataattaccatactagagtttccctcgtatggaatatcgataatagagaatcctccgaataattcattaatatgtacatattgcaagttattctcggtacccaccatcatatcaacgctggtaactatattcttagaaatataaaacttgtctgtatatgtaagatgtttagaaaatggatatttccacattgctttaaaatggacggcgctaacaactgtcatacgagtattaatggatagcggactagtcaataaggaattaattttaccatttgtcattgtcttaacccattcgttgattagttcctttgtttggttagcattattaaagtttacagtttgaaaatcgtcttttattttttgtaggaaggaggcgtggaactcgatactatcgctaccgtatattttatttgcggtagctagtgtcgcacaatacggaatatctacctccatgtcatcattattgtcatcgggtgtattctcattcatattctctatatattttgatagttgttcagctgtagaaccagctgctccatgatttagaatagataaagtagataaaatggaaactggagaaatcaaaacattttcatcagggtgttttaagattagttctttaaagatatccatggtatagacctaacgataacgatatatatcataaataaataatgttaaatttcaatttatgtttgtaccccgtattcatacttaacaaattggtattgcgtacacaatcaatcatattacataccattaataatgcaagcataaaaaattgttagtagatgtttctaaatataggttccgtaagcaaagaatataagaatgaagcggtaatgataaaatcaatcgttatctaaaatgatcatactcatttattttattctattatattaacacatacatttttaacagcaacacattcaatattgtattgttatttttatattatttacacaattaacaatatattattagtttatattactgaattaataatataaaattcccaatcttgtcataaacacacactgagaaacagcataaacacagaatccatcaaaaatgttgataaattatctgatgttgttgttcgctgctatgataatcagatcattcgccgatagtggtaacgctatcgaaacgacattgccagaaattacaaacgctacaacagatattccagctatcagattatgcggtccagagggagatggatattgtttacacggtgactgtatccacgctagagatattgacggtatgtattgtagatgctctcatggttatacaggcattagatgtcagcatgtagtattagtagactatcaacgttcagaaaacccaaacactacaacgtcatatatcccatctcccggtattatgcttgtattagtaggcattattatgtgttgtctattatctgtttataggttcactcgacgaactaaactacctatacaagatatggttgtgccataatttttataaatttttttatgagtatttttacaaaaatgtataaagtgtatgtcttatgtatatttataaaaatgctaagtatgcgatgtatctatgttatttgtatttatctaaacaatacctctacctctagatattatacaaaaattttttatttcggcatattaaagtaaaatctagttaccttgaaaatgaatacagtgggtggttccgtatcaccagtaagaacataatagtcaaatacagtatccgattgagattttgcatacaatactagtctagaaagaaatttgtaatcatcttctgtgacgggagtccatatatctgtatcatcgtctagtttatcagtgtcccatgctatattcctgttatcatcattagttaatgaaaataactctcgtgcttcagaaaagtcaaatattgtatccatacatacatctccaaaactatcgcttatacgtttatctttaacgatacctatacctagatggttatttactaacagacattttccagatctattgactataactcctatagtttccacatcaaccaagtaatgatcatctattgttatataacaataacataactcttttccatttttatcagtatgtatatctatatcaacgtcgtcgttgtagtgaatagtagtcattgatctattatatgaaacggatatgtctagaacggcaattgttttacgtccagttaacactttcgttgatttaaagtctagagtctttgcaaacataatatccttatccgactttatatttcctgtagggtggtataattttattttgcctccacatatcggtgtttccaaatatattactagacaatattccatatagttattagttaagggtacccaattagaacacgtacgcttattatcatcatttggatcgtatttcataaaagttattgtgttatcgatgtcaacacattctacattttttaatcgtctatatagtatttttctgatattttctataatatcagaattgtcttccatcggaagttgtatactatcggaatcagttacatgtttaaataattctctgatgtcattccttatacaatcaaattcattattaaacagtttaatagtctgtagacctttatcgtcgtaaatatccattgtcttattagttacgcttatttttatgtgtttttacgttgctttattatattttataagaatgattgtttgacgaatcacgagaactattaagacacattattaggtatatattataaaaaagtttttgattacgatgttataagaggaaagaggacacattaacatcatacatcaattaactacattcttataacatcgtaatcaaaagaattgcaattttgatgtataacaactgtcaatgggttatggaattgtatattacatattatacggtatgttggtaacgacaaataccggtcggtaattgtctgccggtgtaatagaattatatatatctatctattacaccggccttgtatacataataataagttgtggtagtatgatctccatatttataatttaggactttgtattcagtatttttggaatcataaaaaataaaaaaaagttttactaatttaaaatttaaaaagtatttacatttttttcactgtttagtcgcggatatggaattcgatcctgccaaaatcaatacatcatctatagatcatgtaacaatattacaatacatagatgaaccaaatgatataagactaacagtatgcattatccgaaatattatatcaatatcacaaaaataaatacacatttggctaatcaatttcgggcttggaaaaaacgtatcgccggaagggactatatgactaacttatctagagatacaggaatacaacaatcaaaacttactgaaactatacgtaactgtcaaaaaaatagaaacatatatggtctatatatacactacaatttagttattaattggataaccgatgtgattatcaatcaatattaagagggttggtaaattggtacatagctaataatacctatactccaaatacacccaataatacaacaaccatttctgagttggatatcatcaaaatactaaataaatacgaggacgtgtatagagtaagtaaagaaaaagaatgtggaatttgctatgaagttgtttactcaaaacgatagatactttggtttattggattcgtgtactcatatattttgcataacatgcatcaatatatggcatagaacacgaagagaaaccggtgcgtcggataattgtcctatatgccgtacccgttttagaaacataacaatgagcaagttctataagctagttaactaataaataaaaagtttaatttgttgacgacgtatgtcgttattttttctcgtataaaagattaatttgattctaatataatctttagtattggataaatatcaattcaaattaattccattagattatatcataaataaaaatagtagcacacaactacttcagcaaacattctttttataaatgccatctagcgtagcgaggacacaagtgaacctataattatcaaatttattagtatcagtcacatgaaggactttacgtagagtgacgattccactatctgtggtacgaacggtttcatcttctttgatgccatcacccagatgttctataaacttggtatcctcgtccgatttcatatcctttgccaaccaatacatatagctaaactcaggcatatgttccacacatcctgaacaatgaaattctccagaagatgttacaatgtctagatttggacatttggtttcaaccgcgttaacatatgagtgaacacacccatacatgaaagcgatgagaaataggattctcatcttgccaaaatatcactagaaaaaatttatttatcagttttaaaggtataaaaaatacttattgttgctcgaatattttgtatttgatggtatacggaagattagaaatgtaggtattatcatcaactgattctatggttttatgtattctatcatgtttcactattgcgttggaaataatatcatatgcttccacatatattttattttgttttaactcataatactcacgtaattctggattattggcatatctatgaataattttagctccatgatcagtaaatattaatgagaacatagtattaccacctaccattatttttttcatctcattcaattcttaattgcaaagatctatataatcattatagcgttgacttatggactctggaatcttagacgatgtacagtcatctataatcatggcatatttaatacattgttttatagcatagtcgttatctacgatgttagatatttctctcaatgaatcaatcacacaatctaatgtaggtttatgacataatagcattttcagcagttcaatgtttttagattcgttgatggcaatggctatacatgtatatccgttatttgatctaatgttgacatctgaaccggattctagcagtaaagatactagagattgtttattatatctaacagccttgtgaagaagtgtttctcctcgtttgtcaatcatgttaatgtctttaagataaggtaggcaaatgtttatagtactaagaattgggcaagcataagacatgtcacaaagacccttttttgtatgtataagtgtaaaaattataacatccatagttggatttacataggtgtccaatcgggatctctccatcatcgagataattgatggcatctcccttccttttttagtagatatttcatcgtgtaagaatcaatattaatatttctaaagtatccgtgtatagcctctttatttaccacagctccatattccactagagggatatcgccgaatgtcatatactcaattagtatatgttggaggacatccgagttcattgttttcaatatcaaagagatggtttccttatcatttctccatagtggtacaatactacacattattccgtgcggctttccattttccaaaaacaatttgaccaaatctaaatctacatctttattgtatctataatcactatttagataatcagccataattcctcgagtgcaacatgttagatcgtctatatatgaataagcagtgttatctattcctttcattaacaatttaacgatgtctatatctatatgagatgacttaatataatattgaagagctgtacaatagtttttatctataaaagacggcttgattccgtgattaattagacatttaacaacttccggacgcacatatgctctcgtatccgactctgaatacagatgagagatgatatacagatgcaatacggtaccgcaatttcgtagttgataatcatcatacgcgtatcagtactcgtcctcataaagaacactgcagccattttctatgaacaaatcaataattttagaaacaggatcattgtcattacataattttctataactgaacgatggttttcacatttaacactcaagtcaaatccatgttctaccaacacctttatcaagtcaacgtctacatttttggatttcatatagctgaatatattaaagttatttatgttgctaaatccagtggcttctagtagagccatcgctatatccttattaactttaacatgtctactatttgtgtattcttctaatggggtaagctgtctccaatttttgcgtaatggattagtgccactgtctagtagtagtttgacgacctcgacattattacaatgctcattaaaaaggtatgcgtgtaaagcattattcttgaattggttcctggtatcattaggatctctgtctttcaacatctgtttaagttcatcaagagccacctcctcattttccaaatagtcaaacattttgactgaatgagctactgtgaactctatacacccacacaactaatgtcattaaatatcatgtcaaaaacttgtacaattattaataaaaataatttagtgtttaaattttaccagttccagattttacacctccgttaatacctccattaaccccactggacgatcctcctccccacattccaccgccaccagatgtataagttttagatcctttattactaccatcatgtccatggataaagacactccacatgccgccactaccccctttagaagacatattaataagacttaaggacaagtttaacaataaaattaatcacgagtaccctactaccaacctacactattatatgattatagtttctatttttacagtaccttgactaaagtttctagtcacaagagcaatactaccaacctacactattatatgattatagtttctatttttataggaacgcgtacgagaaaatcaaatgtctaatttctaacggtagtgttgataaacgattgttatccgcggatacctcctctatcatgtcgtctattttcttactttgttctattaacttattagcattatatattatttgattataaaacttatattgcttattagcccaatctgtaaatatcggattattaacatatcgtttctttgtaggtttatttaacatgtacatcactgtaagcatgtccttaccatttattttaatttgacgcatatccgcaatttctttttcgcagtcggttataaattctatatatgatggatacatgctacatgtgtacttataatcgactaatatgaagtacttgatacatattttcagtaacgatttattattaccacctatgaataagtacctgtgatcgtctaggtaatcaactgttttcttaatacattcgatggttggtaatttactcagaataatttccaatatcttaatatataattctgctatttctgggatatatttatctgccagtataacacaaatagtaatacatgtaaacccatattttgttattatattaatgtctgcgccattatctattaaccattctactaggctgacactatgcgactcaatacaatgataaagtatactacatccatgtttatctattttgtttatatcatcaatatacggcttacaaagttttagtatcgataacacatccaactcacgcatagagaaggtagggaataatggcataatatttattaggttatcatcattgtcattatctacaactaagtttccattttttaaaatatactcgacaactttaggatctctattgccaaatttttgaaaatatttatttatatgcttaaatctatataatgtagctccttcatcaatcatacatttaataacattgatgtatactgtatgataagatacatattctaacaatagatcttgtatagaatctgtatatcttttaagaattgtggatattaggatattattacataaactattacacaattctaaaatataaaacgtatcacggtcgaataatagttgatcaactatataattatcgattttgtgatttttcttcctaaactgtttacgtaaatagttagatagaatattcattagttcatgaccactatagttactatcgaataacgcgtcaaatatttcccgtttaatatcgcatttgtcaagataataatagagtgtggtatgttcacgataagtataataacgcatctctttttcgtgtgaaattaaatagtttattacgtccaaagatgtagcataaccatcttgtgacctagtaataatataataatagagaactgttttacccattctatcatcataatcagtggtgtagtcgtaatcgtaatcgtctaattcatcatcccaattataatattcaccagcacgtctaatctgttctattttgatcttgtatccatactgtatgttgctacatgtaggtattcctttatccaataatagtttaaacacatctacattgggatttgatgttgtagcgtatttttctacaatattaataccatttttgatactatttatttctatacctttcgaaattagtaatttcaataagtctatattgatgttatcagaacatagatattcgaatatatcaaaatcattgatatttttatagtcgactgacgacaataacaaaatcacaacatcgtttttgatattattatttttcttggtaacgtatgcctttaatggagtttcaccatcatactcatataatggatttgcaccactttctatcaatgattgtgcactgctggcatcgatgttaaatgttttacaactatcatagagtatcttatcgttaaccatgattggttgttgatgctatcgcattttttggtttctttcatttcagttatgtatggatttagcacgtttgggaagcatgagctcatatgatttcagtactgtagtgtcagtactattagtttcaataagatcaatctctagatctatagaatcaaaacacgataggtcagaagataatgaatatctgtaggcttcttgttgtactgtaacttctggttttgttagatggttgcatcgtgctttaacgtcaatggtacaaattttatcctcgctttgtgtatcatattcgtccctactataaaattgtatattcagattatcatgcgatgtgtatacgctaacggtatcaataaacggagcacaccatttagtcataaccgtaatccaaaaatttttaaagtatatcttaacgaaagaagttgtgtcattgtctacggtgtatggtactagatcctcataagtgtatatatctagagtaatgtttaatttattaaatggttgataatatggatcctcgtgacaatttccgaagatggaaataagacataaacacgcaataaatctaattgcggacatggttactccttaaaaaaatacgaataatcaccttggctatttagtaagtgtcatttaacactatactcatattaatccatggactcataatctctatacgggattaacggatgttctatatacggggatgagtagttctcttctttaactttatactttttactaatcatatttagactgatgtatgggtaatagtgtttgaagagctcgttctcatcatcagaataaatcaatatctctgtttttttgttatacagatgtattacagcctcatatattacgtaatagaacgtgtcatctaccttattaactttcaccgcatagttgtttgcaaatacggttaatcctttgacctcgtcgatttccgaccaatctgggcgtataatgaatctaaactttaattgcttgtaatcattcgaaataatttttagtttgcatccgtagttatcccctttatgtaactgtaaatttctcaacgcgatatctccattaataatgatgtcgaattcgtgctgtatacccatactgaatggatgaacgaataccgacggcgttaatagtaatttactttttcatctttacatattgggtactagttttactatcataagtttataaattccacaagctactatggaataagccaaccatcttagtataccacacatgtcttaaagtttattaattaattacatgttgttttatatatatcgctacgaatttaaagagaaattagtttaggaagaaaaattatctatctacatcatcacgtctctgtattctacgatagagtgctactttaagatgcgacagatccgtgtcatcaaatatatactccattaaaatgattattccggcagcgaacttgatattggatatatcacaacctttgttaatatctacgacaatagacagcagtcccatggttccataaacagtgagtttatctttctttgaagagatattttgtagagatcttataaaactgtcgaatgacatcgcatttatatctttagctaaatcgtatatgttaccatcgtaatatctaaccgcgtctatcttaaacgtttccatcgctttaaagacgtttccgatagatggtctcatttcatcagtcatactgagccaacaaatataatcgtgtataacatctttgatagaatcagactctaaagaaaacgaatcggctttattatacgcattcatgataaacttaatgaaaaatgtttttcgttgtttaagttggatgaatagtatgtcttaataattgttattatttcattaattaatatttagtaacgagtacactctataaaaacgagaatgacataactaatcataactagttatcaaagtgtctaggacgcgtaattttcatatggtatagatcctgtaagcattgtctgtattctggagctattttctctatcgcattagtgagttcagaatatgttataaatttaaatcgaataacgaacataactttagtaaagtcgtctatattaactcttttattttctagccatcgtaataccatgtttaagatagtatattctctagttactacgatctcatcgttgtctagaatatcacatactgaatctacatccaattttagaaattggtctgtgttacatatctcttctatattattgttgatgtattgtcgtagaaaactattacgtagaccattttctttataaaacgaatatatagtactccaattatctttaccgatatatttgcacacataatccattctctcaatcactacatctttaagattttcgttgttaagatatttggctaaactatataattctattagatcatcaacagaatcagtatatatttttctagatccaaagacgaactctttggcgtcctctataatattcccagaaaagatattttcgtgttttagtttatcgagatctgatctgttcatatacgccatgattgtacggtacgttatgataaccgcataaaataaaaatccattttcatttttaaccaatactattcataattgagattgatgtaatactttgttactttgaacgtaaagacagtacacggatccgtatctccaacaagcacgtagtaatcaaatttggtgttgttaaacttcgcaatattcatcaatttagatagaaacttatactcatcatctgttttaggaatccatgtattattaccactttccaacttatcattatcccaggctatgtttcgtccatcatcgttgcgcagagtgaataattcttttgtattcggtagttcaaatatatgatccatgcatagatcggcaaagctattgtagatgtgatttttcctaaatctaatataaaactcgtttactagcaaacactttcctgatttatcgaccaagacacatatggtttctaaatctatcaagtggtggggatccatagttatgacgcagtaacatatattattacattcttgactgtcgctaatatctaaatatttattgttatcgtattggattctgcatatagatggcttgtatgtcaaagatatagaacacataaccaatttatagtcgcgctttacattctcgaatctaaagttaagagatttagaaaacattatatcctcggatgatgttatcactgtttctggagtaggatatattaaagtctttacagatttcgtccgattcaaataaatcactaaataatatcccacattatcatctgttagagtagtatcattaaatctattatattttatgaaagatatatcactgctcacctctatatttcgtacatttttaaactgtttgtataatatctctctgatacaatcagatatatctattgtgtcggtagacgataccgttacatttgaattaatggtgttccattttacaacttttaacaagttgaccaattcatttctaatagtatcaaactctccatgattaaatattttaatagtatccattttatatcactacggacacaaagtagctgacataaaccattgtataatttttatgttttatgtttattagcgtacacattttggaagttccggcttccatgtatttcctggagagcaagtagatgatgaggaaccagatagtttatatccgtacttgcacttaaagtctacattgtcgttgtatgagtatgatcttttaaacccgctagacaagtatccgtttgatattgtaggatgtggacatttaacaatctgacacgtgggtggatcggaccattctcctcctgaacacaggacactagagttaccaatcaacgaatatccactattgcaactataagttacaacgctcccatcggtataaaaatcctcgtatccgttatgtcttccgttggatatagatggaggggattggcatttaacagattcacaaataggtgcctcgggattccataccatagatccagtagatcctaattcacaatacgatttagattcaccgatcaactgatatccgctattacaagagtacgttatactagagccaaagtctactccaccaatatcaagttggccattatcgatatctcgaggcgatgggcatctccgtttaatacattgattaaagagtgtccatccagtacctgtacatttagcatatataggtcccattttttgctttctgtatccaggtagacatagatattctatagtgtctcctatgttgtaattagcattagcatcagtctccacactattcttaaatttcatattaatgggtcgtgacggaatagtacagcatgatagaacgcatcctattcccaacaatgtcaggaacgtcacgctctccaccttcatatttatttatccgtaaaaatgttatcctggacatcgtacaaataataaaaagcccatatatgttcgctattgtagaaattgtttttcacagttgctcaaaaacgatggcagtgacttatgagttacgttacactttggagtctcatctttagtaaacatatcataatattcgatattacgagttgacatatcgaacaaattccaagtatttgattttggataatattcgtattttgcatctgctataattaagatataatcaccgcaagaacacacgaacatctttcctacatggttaaagtacatgtacaattctatccatttgtcttccttaactatatatttgtatagataattacgagtctcgtgagtaattccagtaattacatagatgtcgccgtcgtactctacagcataaactatactatgatgtctaggcatgggagacttttttatccaacgatttttagtgaaacattccacatcgtttaatactacatatttctcatacgtggtataaactccacccattacatatatatcatcgtttacgaataccgacgcgcctgaatatctaggagtaattaagtttggaagtcttatccatttcgaagtgccgtgtttcaaatattctgccacacccgttgaaatagaaaattctaatcctcctattacatataactttccatcgttaacacaagtactaacttctgattttaacgacgacatattagtaaccgttttccattttttcgttttaagatctacccgcgatacggaataaacatgtctattgttaatcatgccgccaataatgtatagacaattatgtaaaacatttgcattatagaattgtctatctgtattaccgactatcgtccaatattctgttctaggagagtaatgggttattgtggatatataatcagagtttttaatgactactatattatgttttataccatttcgtgtcactggctttgtagatttggatatagttaatcccaacaatgatatagcattgcgcatagtattagtcataaacttgggatgtaaaatgttgatgatatctacatcgtttggatttttatgtatccactttaataatatcatagctgtaacatcctcatgatttacgttaacgtcttcgtgggataagatagttgtcagttcatcctttgataattttccaaattctggatcggatgtcaccgcagtaatattgttgattatttctgacatcgacgcattatatagttttttaattccatatcttttagaaaagttaaacatccttatacaatttgtgaaattaatattatgaatcatagtttttacacatagatctactacaggcggaacatcaattattatggcagcaactagtatcatttctacattgtttatggtgatgtttatcttcttccagcgcatatagtctaatagcgattcaaacgcgtgatagtttataccattcaatataatcgcttcatcctttagatggtgatcctgaatgcgtttaaaaaaattatacggagacgccgtaataatttccttattcacttgtataatttccccattgatagaaaatattacgctttccattcttaaagtactataagtaattatagtataatgtaaacgtttatatattcaatatttttataaaaatcattttgacattaattcctttttaaatttccgtctatcatctatagaaacgtattctatgaatttataaaatgcttttacgtgtcctatcgtaggcgatagaaccgctaaaaagcctatcgaatttctacaaaagaatctgttatatggtatagggagagtataaaacattaaatgtccgtacttattaaagtattcagtagccaatcctaactctttcgaatacttattaatggctcttgttctgtacgaatctatttttttgaacaacggacctagtggtatatcttgttctatgtatctaaaataatgtctgactagatccgttagtttaatatccgcagtcatcttgtctagaatggcaaatctaactgcgggtttaggctttagtttagtttctatatctacatctatgtctttatctaacaccaaaaatataatagctaatattttattacaatcatccggatattcttctacgatctcactaactaatgtttctttggttatactagtatagtcactatcggacaaataaagaaaatcagatgatcgatgaataatacatttaaattcatcatctgtaagatttttgagatgtctcattagaatattattagggttagtactcattatcattcggcagctattacttattttattatttttcaccatatagatcaatcattagatcatcaaaatatgtttcaatcatcctaaagagtatggtgaatgactcttcccatctaatttctgaacgttcaccaatgtctctagccactttggcactaatagcgatcattcgcttagcgtcttctatattattaactggttgatttaatctatctagcaatggaccgtcggacagcgtcattctcatgttcttaatcaatgtacatacatcgccgtcatctaccaattcatccaacaacataagctttttaaaatcatcattataataggtttgatcgttgtcatttctccaaagaatatatctaataagtagagtcctcatgcttagttaacaactattttttatgttaaatcaattagtacaccgctatgtttaatacttattcatattttagtttttaggattgagaatcaatacaaaaattaatgcatcattaattttagaaatacttagtttccacgtagtcaatgaaacatttgaactcatcgtacaggacgttctcgtacaggacgtaactataaaccggtttatatttgttcaagatagatacaaatccgataactttttttacgaattctacgggatccactttaaaagtgtcataccgggttctttttatttttttaaacagatcaatggtgtgatgttgattaggtcttttacgaatttgatatagaatagcgtttacatattctccataatggtcaatcgccatttgttcgtatgtcataaattctttaattatatgacactgtgtattatttagttcatccttgttcattgttaggaatctatccaaaatggcaattatactagaactataggtgcgttgtatacacatattgatgtgtctgtttatacaatccatgatatttggatccatgctactaccttcgggtaaaattgtagcatcatataccatttctagtactttaggttcattattatccattgcagaggacgtcatgatcgaatcataaaaaaatatattatttttatgttattttgttaaaaataatcatcgaatacttcgtaagatactccttcatgaacataatcagttacaaaacgtttatatgaagtaaagtatctacgatttttacaaaagtccggatgcataagtacaaagtacgcgataaacggaataataatagatttatctagtctatctttttctatagctttcatagttagatacatggtctcagaagtaggattatgtaacatcagcttcgataaaatgactgggttatttagtcttacacattcgctcatacatgtatgaccgttaactacagagtctacactaaaatgattgaacaatagatagtctaccattgtttcgtattcagatagtacagcgtagtacatggcatcttcacaaattatatcattgtctaatagatatttgacgcatcttatggatcccacttcaacagccatcttaaaatcatattgctttcctttatcattaataatttctagaacatcatctctatcataaaagatacaaatattaactgtttgatccgtaataacattgctagtcaatagcaatttgttaataagatgcgctgggctcaatgtcttaataagaagtgtaagaggactatctccgaatttgttttgtttattaacatccgttgatggaagtaaaagatctataatgtctacattcttgactgttttagagcatacaatatggagaggtgtatttccatcatgatctggttttgagggactaattcctagtttcatcatccatgagattgtagaagcttttggattgtctgacataagatgtctatgaatatgatttttgccaaatttatccactatcctggcttcgaatccgatggacattatttttttaaacactctttctgaaggatctgtacacgccaacaacggaccacatccttcttcatcaaccgagttgttaatcttggctccatactgtaccaataaatttattctctctatgacttcatcatctgttcccgagagataatatagaggtgttttatgctgtttatcacacgcgtttggatctgcgccgtgcgtcagcagcatcgcgactattctattattattaattttagaagctatatgcaatggataatttccatcatcatccgtctcatttggagagtatcctctatgaagaagttcttcgacaaatcgttcatctagtcctttaattccacaatacgcatgtagaatgtgataattatttccagaaggttcgatagcttgtagcatattcctaaatacatctaaatttttactattatatttggcataaagagatagataatactcggccgacataatgttgtccattgtagtataaaaattaatatttctatttctatttctgtatatttgcaacaatttactctctataacaaatatcataacttagtttttttatgtcaagaaggcactggtttagttcatctataaatgtcacgccataactaccacgcatgccatactcagaattatgataaagatatttatccttggggtgtaggtaatggggattaatctttgttggatcagtctctaagttaacacatgtcacacatgatccatttatagttatatcacacgatgatgatttatgaattgattccggaagatcgctatcgtattttgtggttccacaattcatttccatacatgttattgtcacactaatattatgatgaactttatctagccgctgagtggtaaacaacagaacagatagtttattatctttaccaacaccctcagccgctgccacaaatctctgatccgtatccatgatggtcatgtttatttctagtccgtatccagtcaacactatgttagcatttctgtcgatatagctttcactcatatgacactcaccaataatagtagaattaatgtcgtaatttacaccaatagtgagttcggcggcaaagtaccaataccggtaatcttgtcgaggaggacatatagtattcttgtattctaccgaatacccgagagatgcgatacaaaagagcaagactaatttgtaaaccatcttactcaaaatatgtaacaatagtacgatgcaatgagtaagacaataggaaatctatcttatatacacataattattctatcaattttaccaattagttagtgtaatgttaacaaaaatgtgggagaatctaattagtttttctttacacaattgacgtacatgagtctgagttccttgtttttgctaattatttcatccaatttattattcttgacgatatcgagatcttttgtataggagtcaaacttgtattcaacatgcttttctataatcattttagctatttcggcatcatccaatagtacattttccagattagcagaatagatattaatgtcgtatttgaacagagcctgtaacatctcaatgtctttattatctatagccaatttaatgtccggaatgaagagaagggaattattggtgtttgtcgacgtcatatagtcgagcaagagaatcatcatatccacgtgtccattttttatagtgatgtgaatacaactaaggagaatagccagatcaaaagtagatggtatctctgaaagaaagtaggaaacaatacttacatcattaagcatgacggcatgataaaatgaagttttccatccagttttcccatagaacatcagtctccaatttttcttaacaaacagttttaccgtttgcatgttaccactatcaaccgcataatacaatgcggtgtttcccttgtcatcaaattgtgaatcatccagtccactgaatagcaaaatctttactattttggtatcttccaatgtggctgcctgatgtaatggaaattcattctctagaagatttttcaatgctccagcgttcaacaacgtacatactagacgcacgttattatcagctattgcataatacaaggcactatgtccatggacatccgccttaaatgtatctttactagagagaaagcttttcagctgcttagacttccaagtattaattcgtgacagatccatgtctgaaacgagacgctaattagtgtatattttttcattttttataattttgtcatattgcaccagaattaataatatctttaatagatctgattagtagatacatggctatcgcaaaacaacatatacacatttaataaaaataatatttattaagaaaattcagatttcacgtacccatcaatataaataaaataatgattccttacaccgtacccatattaaggagattccaccttacccataaacaatataaatccagtaatatcatgtctgatgatgaacacaaatggtgtattaaattccagtttttcaggagatgatctcgccgtagctaccataatagtagatgcctctgctacagttccttgttcgtcgacatctatctttgcattctgaaacattttataaatatataatgggtccctagtcatatgtttaaacgacgcattatctggattaaacatactaggagccatcatttcggctatcgacttaatatccctcttattttcgatagaaaatttagggagtttaagattgtacactttattccctaattgagacgaccaatagtctaattttgcagccgtgatagaatctgtgaaatgggtcatattatcacctattgccaggtacatactaatattagcatccttatacggaaggcgtaccatgtcatattctttgtcatcgattgtgattgtatttccttgcaatttagtaactacgttcatcatgggaaccgttttcgtaccgtacttattagtaaaactagcattgcgtgttttagtgatatcaaacggatattgccatatacctttaaaatatatagtattaatgattgcccatagagtattattgtcgagcatattagaatctactacattagacataccggatctacgttctactatagaattaattttattaaccgcatctcgtctaaagtttaatctatataggccgaatctatgatattgttgataatacgacggtttaatgcacacagtattatctacgaaactttgataagttagatcagtgtacgtatatttagatgttttcagcttagctaatcctgatattaattctgtaaatgctggacccagatctctttttctcaaatccatagtcttcaataattctattctagtattacctgatgcaggcaatagcgacataaacatagaaaacgaataaccaaacggtgagaagacaatattatcatcttgaatatttttatacgctactataccggcattggtaaatccttgtagacgataggcggacgctgaacacgctaacgatagtatcaataacgcaatcatgattttatggtattaataattaaccttatttttatgttcggtataaaaaaattattgatgtctacacatccttttgtaattgacatctatatatccttttgtataatcaactctaatcactttaacttttacagttttccctaccagtttatccctatattcaacatatctatccatatgcatcttaacactctctgccaagatagcttcagagtgaggatagtcaaaaagataaatatatagagcataatcattctcgtatactctgccctttattacatcacccgcattgggcaacgaataacaaaatgcaagcatcttgttaacgggctcgtaaattgggataaaaattatgtttttattgtcttatatctattttattcaagagaatattcaggaatttctttttccggttgtatctcgtcgcagtatatatcatttgtacattgtttcatattttttaatagtttacaccttttagtaggactagtatcgtacaattcatagctgtattttgaattccaatcacgcataaaaatatcttccaattgttgacgaagacctaatccatcatccggtgtaatattaatagatgctccacatgtatccgtaaagtaatttcctgtccaatttgaggtacctatataggccgttttatcggttaccatatatttggcatggtttaccctagaatacggaatgggaggatcagcatctggtacaataaatagctttacttctatatttatgtttttagattttagcatagcgatagatcttaaaaagtttctcatgataaacgaagatcgttgccagcaactaatcaatagcttaacggatacttgtctgtctatagcggatcttcttaattcatcttctatataaggccaaaacaaaattttacccgccttcgaataaataatagggataaagttcataacagatacataaacgaatttactcgcatttctaatacatgacaataaagcggttaaatcattggttctttccatagtacatagttgttgcggtgcagaagcaataaatacagagtgtggaacgccgcttacgttaatactaagaggatgatctgtattataatacgacggataaaagtttttccaattatatggtagattgttaactccaagataccagtatacctcaaaaatttgagtgagatccgctgccaagttcctattattgaagatcgcaatacccaattccttgacctgagttagtgatctccaatccatgttagcgcttcctaaataaatatgtgtattatcagatatccaaaattttgtatgaagaactcctcctaggatatttgtaatatctatgtatcgtacttcaactccggccatttgtagtctttcaacatcctttaatggtttgttagatttattaacggctactctaactcgtactcctcttttgggtaattgtacaatctcgtttaatattatcgtgccgaaattcgtacccacttcatccgataaactccaataaaaagatgatatatctagtgtttttgtggtattggatagaatttccctccacatgttaaatgtagacaaatatactttatcaaattgcatacctataggaatagtttctgtaatcactgcgattgtattatccggattcattttatttgttaaaagaataatcctatatcacttcactctattaaaaatccaagtttctatttctttcatgactgattttttaacttcatccgtttccttatgaagatgatgtttggcaccttcataaatttttatttctctattacaatttgcatgttgcatgaaataatatgcacctaaaacatcgctaatcttattgtttgttccctggagtatgagagtcggggggtgttaatcttggaaattatttttctaaccttgttggtagccttcaagacctgactagcaaatccagccttaattttttcatgattgactaatgggtcgtattggtatttataaactttatccatatctctagatactgattctggacatagctttccgactggcgcatttggtgtgatggttcccataagtttggcagctagcagattcagtcttgaaacagcatctgcattaactagaggagacattagaatcattgctgtaaacaagtttggattatcgtaagaggctagctcccatggaatgacccaataagtagatttaatagttaccacgtgctgtaccaaagtcatcaatcatcattttttcaccattacttcttccatgtccaatatgatcatgtgagaatactaaaattcctaacgatgatatgttttcagctagttcgtcataacgtccagaatgtttaccagctccatgacttatgaatactaatgccttaggatatgtaataggtttccaatatttacaatatatgtaatcattgtccagattgaacatacagtttgcactcatgattcacgttatataactatcaatattaacagttcgtttgatgatcatattatttttatgttttattgataattgtaaaaacatacaattaaatcaatatagaggaaggagacggctactgtcttttgtaagatagtcatggcgactaaattagattatgaggatgctgttttttactttgtggatgatgataaaatatgtagtcgcgactccatcatcgatctaatagatgaatatattacgtggagaaatcatgttatagtgtttaacaaagatattaccagttgtggaagactgtacaaggaattgatgaagttcgatgatgtcgctatacggtactatggtattgataaaattaatgagattgtcgaagctatgagcgaaggagaccactacatcaattttacaaaagtccatgatcaggaaagtttattcgctaccataggaatatgtgctaaaatcactgaacattggggatacaaaaagatttcagaatctagattccaatcattgggaaacattacagatttgatgaccgacgataatataaacatcttgatactttttctagaaaaaaaattgaattgatgatataggggtcttcataacgcataattattacgttagcattctatatccgtgttaaaaaaaattatcctatcatgtatttgagagttttatatgtagcaaacatgatagctgtgatgccaataagctttagatattcacgcgtgctagtgttagggatggtattatctggtggtgaaatgtccgttatataatctacaaaacaatcatcgcatatagtatgcgatagtagagtaaacatttttatagtttttactggattcatacatcgtctacccaattcggttataaatgaaattgtcgccaatcttacacccaaccccttgttatccattagcatagtattaacttcgttatttatgtcataaactgtaaatgattttgtagatgccatatcatacatgatattcatgtccctattataatcattactaactttatcacaatatatgttgataatatctatatatgatctagtctttgtgggcaactgtctatacaagtcgtctaaacgttgtttactcatatagtatcgaacagccatcattacatggtcccgttccgttgatagataatcgagtatgttagtggacttgtcaaatctatataccatattttctggaagtggatatacatagtcgtgatcaacattattgctagcctcatcttctatatcctgtactataccattatctatatcatctacataatctatgatattattacacataaacatcgacaacatactattgtttattatctaagtcctgttgatccaaacccttgatctcctctatttgtactatctagagattgtacttcttccagttctggataatatatacgttgatagattagctgagctattctatctccagtatttacattaaacgtacattttccattattaataagaatgactcctatgtttcccctataatcttcgtctattacaccacctcctatatcaatgccttttagtgacagaccagacctaggagctattctaccatagcagaacttaggcatggacatactaatatctgtcttaattaactgtctttctcctggagggatagtataatcgtaagcgctatacaaatcatatccggcagcacccggcgattgcctagtaggagatttagctctgttagtttccttaacaaatctaactggtgagttaatattcatgttgaacataaaactaatattttatttcaaaattatttaccatcccatatattccatgaataagtgtgatgattgtacacttctatagtatctatatacgatccacgataaaatcctcctatcaatagcagtttattatccactatgatcaattctggattatccctcggataaataggatcatctatcagagtccatgtattgctggattcacaataaaattccgcatttctaccaaccaagaataaccttctaccgaacactaacgcgcatgatttataatgaggataataagtggatggtccaaactgccactgatcatgattgggtagcaaatattctgtagttgtatcagtttcagaatgtcctcccattacgtatataacattgtttatggatgccactgctggattacatctaggtttcagaagactcggcatattaacccaagcagcatccccgtggaaccaacgctcaacagatgtgggatttggtagacctcctactacgtataatttattgttagcgggtatcccgctagcatacagtctggggctattcatcggaggaattggaatccaattgtttgatatataatttacagctatagcattgttatgtatttcattgttcatccatccaccgatgagatatactacttctccaacatgagtacttgtacacatatggaatatatctataatttgatccatgttcataggatactctatgaatggatacttgtatgatttgcgtggttgtttatcacaatgaaatattttggtacagtctagtatccattttacattatttatacctctgggagaaagataatttgacctgattacatttttgataaggagtagcagatttcctaatttatttcttcgcctcatataccacttaatgacaaaatcaactacataatcctcatctggaacatttagttcatcgctttctagaataagtttcatagatagataatcaaaattgtctatgatgtcatcttccagttccaaaaagtgtttggcaataaagtttttagtatgacataagagattggatagtccgtattctatacccatcatgtaacactcgacacaatattcctttctaaaatctcgtaagataaagtttatacaagtgtagatgataaattctacagaggttaatatagaagcacgtaataaattgacgacgttatgactatctatatatacctttccagtatatgagtaaataactatagaagttaaactgtgaatgtcaaggtctagacaaacccttgtaactggatctttatttttcgtgtatttttgacgtaaatgtgtgcgaaagtaaggagataactttttcaatatcgtagaattgactattatattgcctcctatggcatcaataattgttttgaatttcttagtcatagacaatgctaatatattcttacagtacacagtattgacaaatatcggcatttatgtttctttaaaagtcaacatctagagaaaaatgattatctttttgagacataactcccattttttggtattcacccacacgtttttcgaaaaaattagtttttccttccaatgatatattttccatgaaatcaaacggattggtaacattataaatttttttaaatcccaattcagaaatcaatctatccgcgacgaattctatatatgttttcatcatttcacaattcattcctataagtttaactggaagagccgcagtaagaaattcttgttcaatggatactgcatctgttataatagatctaacggtttcttcactcggtggatgcaataaatgtttaaacatcaaacatgcgaaatcgcagtgcagaccctcgtctctactaattagttcgttggaaaacgtgagtccgggcattaggccacgctttttaagccaaaatatggaagcgaatgatccagaaaagaaaattccttctactgcagcaaaggcaataagtctctctccataaccggcgctgtcatgtatccacttttgagcccaatcggccttcttttttacacaaggcatcgtttctatggcattaaagagatagtttttttcattactatctttaacataagtatcgatcaaaagactatacatttccgaatgaatgttttcaatggccatctgaaatccgtagaaacatctagcctcggtaatctgtacttctgtacaaaatcgttccgccaaattttcattcactattccgtcactggctgcaaaaaacgccaatacatgttttataaaatatttttcgtctggtgttagtttattccaatcattgatatctttagatatatctacttcttccactgtccaaaatgatgcctctgcctttttatacatgttccagatgtcatgatattggattgggaaaataacaaatctatttggatttggtgcaaggatgggttccataactaaattaacaataacaataaattttttttcagttatctatatgcctgtacttggattttttgtacatcgatatcgccgcaatcactacaataattacaagtattattgatagcattgttattagtactatcataattaaattatctacattcatgggtgctgaataatcgttattatcatcattatcattttgtaattgtgacatcatactagataaatcgtttgcgagattgttgtgggaagcgggcatggaggatgcattatcattattatttaacgccttccatttggattcacaaatgttacgcacattcaacattttatggaaactataattttgtgaaaacaaataacaagaaaactcgtcatcgttcaaatttttaacgatagtaaaccgattaaacgtcgagctaatttctaacgctagcgactctgttggatatgggtttccagatatatatcttttcagttcccctacgtatctataatcatctgtaggaaatggaagatatttccatttatctactgttcctaatatcatatgtggtggtgtagtagaaccattaagcgcgaaagatgttatttcgcatcgtattttaacttcgcaataatttctggttagataacgcactctaccagtcaagtcaatgatattagcctttacagatatattcatagtagtcgtaacgatgactccatcttttagatgcgatactcctttgtatgtaccagaatcttcgtacctcaaactcgatatatttaaacaagttaatgagatattaacgcgttttatgaatgatgatatataaccagaagttttatcctcggtggctagcgctataaccttatcattataataccaactagtgtgattaatatgtgacacgtcagtgtgggtacaaatatgtacattatcgtctacgtcgtattcgatacatccgcatacagccaacaaatataaaatgacaaatactctaacgccgttcgtacccatcttgatgcggtttaataaatgttttgatttcaatttattgtaaaaaaagattcggttttatactgttcgatattctcattgcttatattttcatctatcatctccacacagtcaaatccgtggttagcatgcacctcatcaaccggtaaaagactatcggactcttctatcattataactctagaatatttaatttggtcattattaatcaagtcaattatcttatttttaacaaacgtgagtattttactcattttttataaaaacttttagaaatatacagactctatcgtgtgtctatatcttctttttatatccaatgtatttatgtctgatttttcttcatttatcatatataatggtccaaattctacacgtgcttcggattcatccagatcattaaggttcttataattgtaacatccttctcttccctcttctacatcttccttcttattcttattcttagcgtcacagaatctaccacagcaggatcccatgacgagcgtcatattaaactaatccattttcaattataatatatgattagtaatgaccattaaaataaaaaatattcttcataaccggcaagaaagtgaaaagttcacattgaaactatgtcagtagtatacatcatgaaatgatgatatatatatactctattttggtggaggattatatgatataattcgtggataatcatttttaagacacatttctttattcgtaaatcttttcacgttaaatgagtgtccatattttgcaatttcttcatatgatggcggtgtacgtggacgaggctgctcctgttcttgttgtggtcgccgactgtcgtgtctgcgtttagatccctccattatcgcgattgcgtagatggagtactattttataccttgtaattaaatttttttattaattaaacgtataaaaacgttccgtatctgtatttaagagccagatttcgtctaatagaacaaatagctacagtaaaaataactagaataattgctacacccactagaaaccacggatcgtaatacggcaatcggttttcgataataggtggaacgtatattttatttaaggacttaacaattgtctgtaaaccacaatttgcttccgcggatcctgtattaactatctgtaaaagcatatgttgaccgggcggagccgaacattctccgatatctaatttctgtatatctataatattattaacctccgcatacgcattacagttcttttctagcttggataccgcactaggtacatcgtctagatctattcctatttcctcagcgatagctcttctatccttttccggaagcaatgaaatcacttcaataaatgattcaaccatgagtgtgaaactaagtcgagaattactcatgcatttgttagttattcggagcgcgcaatttttaaactgtcctataacctctcctatatgaatagcacaagtgacattagtagggatagaatgttgagctaatttttgtaaataactatctataaaaagattatacaaagttttaaactctttagtttccgccatttatccagtctgagaaaatgtctctcataataaatttttccaagaaactaattgggtgaagaatggaaacctttaatctatatttatcacagtctgttttggtacacatgatgaattcttccaatgccgtactaaattcgatatctttttcgatttctggatatgtttttaataaagtatgaacaaagaaatggaaatcgtaataccagttatgtttaactttgaaattgttttttattttcttgttaatgattccagccacttgggaaaagtcaaagtcgtttaatgccgatttaatacgttcattaaaaacaaactttttatcctttagatgaattattattggttcattggaatcaaaaagtaagatattatcgggtttaagatctgcgtgtaaaaagttgtcgcaacagggtagttcgtagattttaatgtataacagagccatctgtaaaaagataaactttatgtattgtaccaaagatttaaatcctaatttgatagctaactcggtatctactttatctgccgaatacagtgctaggggaaaaattataatgtttcctctttcatattcgtagttagttctcttttcatgttcgaaaaagtgaaacatgcggttaaaatagtttataacattaatattactgttaataactgccggataaaagtgggatagtaatttcacgaatttgatactgtcctttctctcgttaaacgcctttaaaaaaactttagaagaatatctcaatgagagttcctgaccatccatagtttgtatcaataatagcaacatatgaagaacacgtttatacagagtatgtaaaaatgttaatttatagtttaatcccatggcccacgcacacacgattaattttttttcatctccctttagattgttgtatagaaatttgggtactgtgaactccgccgtagtttccatgggactatataattttgtggcctcgaatacaaattttactacatagttatctatcttaaagactataccatatcctcctgtagatatgtgataaaaatcgtcgtttataggataaaatcgtttatccttttgttggaaaaaggatgaattaatgtaatcattctcttctatctttagtagtgtttccttattaaaattcttaaaataatttaacaatctaactgacggagcccaattttggtgtaaatctaattgggacattatattgttaaaatacaaacagtctcctaatataacagtatctgataatctatggggagacatccattgatattcaggggatgaatcattggcaacacccatttattgtacaaaaagccccaatttacaaacgaaagtccaggtttgatagagacaaacaattaactattttgtctctgtttttaacacctccacagtttttaatttctttagtaatgaaattattcacaatatcagtatcttctttatctaccagagattttactaacttgataaccttggctgtctcattcaatagggtagtaatatttgtatgtgtgatattgatatctttttgaattgtttcttttagaagtgattctttgatggtgccagcatacgaattacaataatgcagaaactcggttaacatgcaggaattatagtaagccaattccaattgttgcctgtgttgtattagagtgtcaatatgagcaatggtgtccttgcgtttctctgatagaatgcgagcagcgattttggcgttatcatttgacgatatttctggaatgacgaatcctgtttctactaactttttggtaggacaaagtgaaacaatcaagaagatagcttctcctcctatttgtggaagaaattgaactcctctagatgatctactgacgatagtatctccttgacagatattggaccgaattacagaagtacctggaatgtaaagccctgaaaccccctcattttttaagcagattgttgccgtaaatcctgcactatgcccaagatagagagctcctttggtgaatccatctctatgtttcagtttaaccaagaaacagtcagctggtctaaaatttccatctctatctaatacagcatctaacttgatgtcaggaactatgaccggtttaatgttatatgtaacattgagtaaatccttaagttcataatcatcactgtcatcagttatgtacgatccaaacaatgtttctaccggcatagtggatacgaagatgctatccatcagaatgtttccctgattagtattttctatatagctattcttctttaaacgattttccaaatcagtaactatgttcatttttttaggagtaggacgcctagccagtatggaagaggattttctagatcctctcttcaacatctttgatctcgatggaatgcaaaaccccatagtgaaacaaccaacgataaaaataatattgtttttcactttttataattttaccatctgactcatggattcattaatatctttataagagctactaacgtataattctttataactgaactgagatatatacaccggatctatggtttccataattgagtaaatgaatgctcggcaataactaatggcaaatgtatagaacaacgaaattatactagagttgttaaagttaatattttctatgagctgttccaataaattatttgttgtgactgcgttcaagtcataaatcatcttgatactatccagtaaaccgtttttaagttctggaatattatcatcccattgtaaagcccctaattcgactatcgaatatcctgctctgatagcagtttcaatatcgacggacgtcaatactgtaataaaggtggtagtattgtcatcatcgtgataaactacgggaatatggtcgttagtaggtacggtaactttacacaacgcgatatataactttccttttgtaccatttttaacgtagttgggacgtcctgcagggtattgttttgaagaaatgatatcgagaacagatttgatacgatatttgttggattcctgattattcactataatataatctagacagatagatgattcgataaatagagaaggtatatcgttggtaggataatacatccccattccagtattctcggatactctattgatgacactagttaagaacatgtcttctattctagaaaacgaaaacatcctacatggactcattaaaacttctaacgctcctgattgtgtctcgaatgcctcgtacaaggatttcaaggatgccatagattctttgaccaacgatttagaattgcgtttagcatctgatttttttattaaatcgaatggtcggctctctggtttgctaccccaatgataacaatagtcttgtaaagataaaccgcaagaaaatttatacgcatccatccaaataaccctagcaccatcggatgatattaatgtattattatagattttccatccacaattattgggccagtatactgttagcaacggtatatcgaatagattactcatgtaacctactagaatgatagttcgtgtactagtcataatatctttaatccaatctaaaaaatttaaaattagattttttacactgttaaagttaacaaaagtattacccgggtacgtggatatcatatatggcattggtccattatcagtaatagctccataaactgatacggcgatggtttttatatgtgtttgatctaacgaggaagaaattcgcgcccacaattcatctctagatatgtatttaatatcaaacggtaacacatcaatttcgggacgcgtatatgtttctaaatttttaatccaaatataatgatgacctatatgccctattatcatactgtcaactatagtacacctagggaacttacgatacatctgtttcctataatcgttaaattttacaaatctataacatgctaaaccttttgacgacagccattcattaatttctgatatggaatctgtattctcgataccgtatcgttctaaagccagtgctatatctccctgttcgtgggaacgctttcgtataatatcgatcaacggataatctgaagtttttggagaataatatgactcatgatctatttcgtccataaacaatctagacataggaattggaggcgatgatcttaattttgtgcaatgagtcgtcaatcctataacttctaatcttgtaatattcatcatcgacataatactatctatgttatcatcgtatattagtataccatgaccttcttcatttcgtgccaaaatgatatacagtcttaaatagttacgcaatatctcaatagtttcataattgttagctgttttcatcaaggtttgtatcctgtttaacatgatggcgttctataacgtctctattttctatttttaattttttaaatttttaacgatttactgtggctagatacccaatctctctcaaatatttttttagcctcgcttacaagctgtttatctatactattaaaactgacgaatccgtgattttggtaatgggttccgtcgaaatttgccgaagtgatatgaacatattcgtcgtcgactatcaacaattttgtattattctgaatagtgaaaaccttcacagatagatcattttgaacacacaacgcatctagacttttggcggttgccatagaatatacgtcgttcttatcccaattaccaactagaagtctgatcttaactcctctattaatggctgcttctataatggagttgtaaatgtcgggccaatagtagctattaccgtcgacacgtgtagtgggaactatggccaaatgttcaatatctatactagtcttagctgacctgagtttatcaataactacatcggtatctagatctctagaatatcccaataggtgttccggagaatcagtaaagaacactccacctataggattcttaatatgatacgcagtgctaactggcaaacaacaagccgcagagcataaattcaaccatgaattttttgcgctattaaaggctttaaaagtatcaaatcttctacgaagatctgtggccagcgggggataatcagaatatacacctaacgttttaatcgtatgtatagatcctccagtaaatgacgcgtttcctacataacatctttcatcatctgacacccaaaaacaaccgagtagtagtcccacattattttttttatctatattaacggttataaaatttatatccgggcagtgactttgtagctctcccagatttcttttccctcgttcatctagcaaaactattattttaatccctttttcagatgcctcttttagtttatcaaaaataagcgctcccctagtcgtactcagaggattacaacaaaaagatgctatgtatatatatttcttagctagagtgataatttcgttaaaacattcaaatgttgttaaatgatcggatctaaaatccatattttctggtagtgtttctaccagcctacattttgctcccgcaggtaccgatgcaaatggccacatttagttaacataaaaacttatacatcctgttctatcaacgattctagaatatcatcggctatatcgctaaaattttcatcaaagtcgacatcacaacctaactcagtcaatatattaagaagttccatgatgtcatcttcgtctatttctatatccgtatccattgtagattgttgaccgattatcgagtttaaatcattactaatactcaatccttcagaatacaatctgtgtttcattgtaaatttataggcggtgtatttaagttggtagattttcaattatgtattaatatagcaacagtagttcttgctcctccttgattctagcatcctcttcattattttcttctacgtacataaacatgtccaatacgttagacaacacaccgacgatggcggccgctacagacacgaatatgactaaaccgatgaccatttaaaaacccctctctagctttcacttaaactgtatcgatcattcttttagcacatgtataatataaaaacattattctatttcgaatttaggcttccaaaaatttttcatccgtaaaccgataataatatatatagacttgttaatagtcggaataaatagattaatgcttaaactatcatcatctccacgattagagatacaatatttacattctttttgctgtttcgaaactttatcaatacacgttaatacaaacccaggaaggagatattgaaactgaggctgttgaaaatgaaacggtgaatacaataattcagataatgtaaaatcatgattccgtattctgatgatattagaactgctaatggatgtcgatggtatgtatctaggagtatctattttaacaaagcatcgatttgctaatatacaattatccttttgattaattgttattttattcatattcttaaaaggtttcatatttatcaattcttctacattaaaaatttccatttttaatttatgtagccccgcaatactcctcattacgtttcattttttgtctataatatccattttgttcatctcggtacatagattatccaattgagaagcgcatttagtagttttgtacattttaagtttattgacgaatcgtcgaaaactagttatagttaacattttattatttgataccctgatattaatacccctgccgttactattatttataactgatgtaatccacgtaacattggaattaactatcgatagtaatgcatcgacgcttccaaaattgtctattataaactcaccgataatttttttattgcatgttttcatattcattaggattatcaaatctttaatcttattacgattgtatgcgttgatattacaagacgtcattctaaaagacggaggatctccatcaaatgccagacaatcacgtacaaagtacatggaaataggttttgttctattgcgcatcatagatttatatagaacacccgtagaaatactaatttgttttactctataaaatactaatgcatctatttcatcgttttgtataacgtctttccaagtgtcaaattccaaatttttttcattgatagtaccaaattcttctatctctttaactacttgcatagataggtaattacagtgatgcctacatgccgttttttgaaactgaatagatgcgtctagaagcgatgctacgctagtcacaatcaccactttcatatttagaatatatatatgtaaaaatatagtagaatttcattttgtttttttctatgctataaatgaattctcattttgcatctgctcatactccgttttatattaataccaaagaaggaagatatctggttctaaaagccgttaaagtatgcgatgttagaactgtagaatgcgaaggaagtaaagcttcctgcgtactcaaagtagataaaccctcatcgcccgcgtgtgagagaagaccttcgtccccgtccagatgcgagagaatgaataaccctggaaaacaagttccgtttatgaggacggacatgctacaaaatatgttcgcggctaatcgcgataatgtagcttctagacttttgtcctaaaatactattatatccttttcgatattaataaatccgtgtcgtccaggttttttatctctttcagtatgtgaatagataggtattttatctctattcatcatcgaatttaagagatccgataaacattgtttgtattctccagatgtcagcatctgatacaacaatatatgtgcacataaacctctggcacttatttcatgtaccttccccttatcactaaggagaatagtatttgagaaatatgtatacatgatattatcatgaattagatatacagaatttgtaacactctcgaaatcacacgatgtgtcggcgttaagatctaatatatcactcgataacacattttcatctagatacactagacattttttaaagctaaaatagtctttagtagtaacagtaactatgcgattattttcatcgatgatacatttcatcggcatattattacgcttaccatcaaagactataccatgtgtatatctaacgtattctagcatggttgccatacgcgcattaaacttttcaggatctttggatagatcttccaatctatctatttgagaaaacatttttatcatgttcaatagttgaaacgtcggatccactatatagatattatctataaagattttaggaactacgttcatggtatcctggcgaatattaaaactatcaatgatatgattatcgttttcatcttttatcaccatatagtttctaagatatgggattttacttaatataatattatttcccgtgataaattttattagaaaggccaaatctataagaaaagtcctagaattagtctgaagaatatctatatcgccgtatagtatatttggattaattagatatagagaatatgatccgtaacatatacaacttttattatggcgtctaagatattcttccatcaacttattaacatttttgactagggaagatacattatgacgtcccattacttttgccttgtctattactgcgacgttcatagaatttagcatatctcttgccaattcttccattgatgttacattataagaaattttagatgaaattacatttggagctttaatagtaagaactcctaatatgtccgtgtatgtggtcactaatacagattgtagttctataatcgtaaataatttacctatattatatgtttgagtctgtttagaaaagtagctaagtatacgatcttttatttctgatgcagatgtattaacatcggaaaaaaatctttttttattcttttttactaaagatacaaatatgtctttgttaaaaacagttattttctgaatatttctagcttgtaattttaacatatgatattcgttcacactaggtactctgcctaaataggtttctataatctttaatgtaatattaggaaaagtattctgatcaggattcctattcattttgaggatttaaaactctgattattgtctaatatggtctctacgcaaactttttcacagagcgatagagtttttgataactcgtttttcttaagaaatataaaactactgtctccagagctcgctctatcttttattttatctaattcgatacaaactcctgatactggttcagaaagtaattcattaattttcagtcctttatagaagatatttaatatagataatacaaaatcttcagtttttgatatcgatctgattgatcctagaactagatatattaataacgtgctcattaggcagtttatggcagcttgataattagatatagtatattccagttcatatttattagataccgcattgcccagattttgatattctatgaattcctctgaaaataaatccaaaataactagacattctattttttgtggattagtgtactctcttccctctatcatgttcactactggtgtccacgatgataaatatctagagggaatataatatagtccataggatgccaatctagcaatgtcgaataactgtaattttattcttcgctcttcattatgaattgattcttgaggtataaacctaacacaaattatattattagacttttcgtatgtaatgtctttcatgttataagtttttaatcctggaatagaatctattttaatgaggcttttaaacgcagagttctccaacgagtcaaagcataatactctgttgtttttcttatatacgatgttacgattttcttctttgaatggaataggtttttgaattagtttataattacaacataatagataaggaagtgtgcaaatagtacgcggaaaaaacataatagctcccctgttttcatccatggttttaagtaaatgatcactggcttctttagtcaatggatattcgaacattaaccgtttcatcatcattggacagaatccatatttcttaatgtaaagagtgatcaaatcattgtgtttattgtaccatcttgttgtaaatgtgtattcggttatcggatctgctcctttttctattaaagtatcgatgtcaatctcgtctaagaattcaactatatcgacatatttcatttgtatacacataaccattactaacgtagaatgtataggaagagatgtaacgggaacagggtttgttgattcgcaaactattctaatacataattcttctgttaatacgtcttgcacgtaatctattatagatgccaagatatctatataattattttgtaagatgatgttaactatgtgatctatataagtagtgtaataattcatgtattttgatatatgttccaactctgtctttgtgatgtctagtttcgtaatatctatagcatcctcaaaaaatatattcgcatatattcccaagtcttcagttctatcttctaaaaaatcttcaacgtatggaatataataatctattttacctcttctgatatcattaatgatatagtttttgacactatcttctgtcaattgattcttattcactatatctaagaaacggatagcgtccctaggacgaactactgccattaatatctctattatagcttctggacataattcatctattataccagaattaatgggaactattccgtatctatctaacatagttttaagaaagtcagaatctaagacttgatgttcatatattggttcatacatgaaatgatctctattgatgatagtgactatttcattctctgaaaattggtaactcattctatatatgctttccttgttgatgaaggatagaatatactcaatagaatttgtaccaacaaactgttctcttatgaatcgtatatcatcatctgaaataatcatgtaaggcatacatttaacaattagagacttgtctcctgttatcaatatactattcttgtgataatttatgtgtgaggcaaatttgtccacgttctttaattttgttatagtagatatcaaatccaatggagctacagttcttggcttaaacagatatagtttttctggaacaaattctacaacattattataaaggactttgggtagataagtgggatgaaatcctattttaattaatgcgatagccttgtcctcgtgcagatatccaaacgcttttgtgatagtatggcattcattgtctagaaacgctctacgaatatctgtgacagatatcatctttagagaatatactagtcgcgttaatagtactacaatttgtattttttaatctatctcaataaaaaaattaatatgtatgattcaatgtataactaaactactaactgttattgataactagaatcagaatctaatgatgacgtaaccaagaagtttatctactgccaatttagctgcattatttttagcatctcgtttagattttccatcggccttatcgaatactcttccgtcgatgtctacacaggcataaaatgtaggagagttactaggcccaactgattcaatacgaaaagaccaatctctcctagtaatttggcagtactcattaataacggtgacagggttagcatctttccaatcaataatttttttagccggaataacatcatcaaaagacttatgatcctctctcattgatttttcgcgggatacatcatctattatgacgtcagccatagcatcagcatccggcttatccgcctccgttgtcataaaccaacgaggaggaatatcgtcggagctgtacaccatagcactacgttgaagatcgtacagagctttattaacttctcgcttctccatattaagttgtctagttagttgtgcagcagtagctccttcgattccaatgtttttaatagccgcacacacaatctctgcgtcagaacgctcgtcaatatagatcttagacatttttagagagaactaacgcaaccagcaataaaactgaacctactttatcatttttttattcatcatcctctggtggttcgtcgttcctatcaaatgtagctctgattaacccgtcatctataggtgatgctggttctggagattctggaggagatggattattatctggaagaatctctgttatttccttgttttcatgtatcgattgcgttgtaacattaagattgcgaaatgctctaaatttgggaggcttaaagtgttgtttgcaatctctacacgcgtgtctaactagtggaggttcgtcagctgctctagtttgaatcatcatcggcgtagtattcctacttttacagttaggacacggtgtattgtatttctcgtcgagaacgttaaaataatcgttgtaactcacatcctttattttatctatattgtattctactcctttcttaatgcattttataccgaataagagatagcgaaggaattctttttcggtgccgctagtacccttaatcatatcacatagtgttttatattccaaatttgtggcaatagacggtttatttctatacgatagtttgtttctggaatcctttgagtattctataccaatattattctttgattcgaatttagtttcttcgatattagattttgtattacctatattcttgatgtagtactttgatgatttttccatggcccattctattaagtcttccaagttggcatcatccacatattgtgatagtaattctcggatatcagtagcggctaccgccattgatgtttgttcattggatgagtaactactaatgtatacattttccatttataacacttatgtattaactttgttcatttatattttttcattattatgttgatattaacaaaagtgaatatatatatgttaataattgtattgtggttatacggctacaattttataatgagtgaaagtcagtgtccgatgatcaatgacgatagctttactctgaaaagaaagtatcaaatcgatagtgcggagtcaacaataaaaatggataagaagaggataaagtttcagaatagagccaaaatggtaaaagaaataaatcagacaataagagcagcacaaactcattacgagacattgaaactaggatacataaaatttaagagaatgattatgactactactctagaagatatagcaccatctattccaaataatcagaaaacttataaactattctcggacatttcagccatcggcaaagcatcacagaatccgagtaagatggtatatgctctgctgctttacatgtttcccaatttgtttggagatgatcatagattcattcgttatagaatgcatccaatgagtaaaatcaaacacaagatcttctctcctttcaaacttaatcttattagaatattagtggaagaaagattctataataatgaatgcagatctaataaatggagaataattggaacacaagttgataaaatgttgatagctgaatctgataaatatacaatagatgcaaggtataacctaaaacccatgtatagaatcaagggagaatctgaagaagataccctctttatcaaacagatggtagaacaatgtgtgacatcccaggaattggtggaaaaagtgttgaagatactgtttagagatttgttcaagagtggagaatacaaagcgtacagatacgatgatgatgtagaaaatggatttattggattggatacactaaaattaaacattgttcatgatatagttgaaccatgtatgcctgttcgtaggccagtggctaagatactgtgtaaagaaatggtaaataaatactttgagaatccgctacatattattggtaaaaatcttcaagagtgcattgactttgttagtgaataggcatttcatctttctccaatactaattcaaattgttaaattaataatggatagtataaatagttattagttataagatagtaaaaataattattagaataagagtgtagtatcatagataactctcttctataaaaatggattttattcgtagaaagtatcttatatacacagtagaaaataatatagattttttaaaggatgatacattaagtaaagtaaacaattttaccctcaatcatgtactagctctcaagtatctagttagcaattttcctcaacacgttattactaaggatgtattagctaataccaatttttttgttttcatacatatggtacgatgttgtaaagtgtacgaagcggttttacgacacgcatttgatgcacccacgttgtacgttaaagcattgactaagaattatttatcgtttagtaacgcaatacaatcgtacaaggaaaccgtgcataaactaacacaagatgaaaaatttttagaggttgccgaatacatggacgaattaggagaacttataggcgtaaattatgacttagttcttaatccattatttcacggaggggaacccatcaaagatatggaaatcatttttttaaaactgtttaagaaaacagacttcaaagttgttaaaaaattaagtgttataagattacttatttgggcatacctaagcaagaaagatacaggcatagagtttgcggataatgatagacaaaatatatacactctatttcaacaaactggtagaatcgtccatagcaatctaacagaaacgtttagagattatatctttcccggagataagactagctattgggtgtggttaaacgaaagtatagctaatgatgcggatatcgttcttaatagacacgccattaccatgtatgataaaattcttagttatatatactctgagataaaacaaggacgcgttaataaaaacatgcttaagttagtttatatctttgagcctgaaaaagatatcagagaacttctgctagaaatcatatatgatattcctggagatatcctatctattattgatgcaaaaaacgacgattggaaaaaatattttattagtttttataaagctaattttattaacggtaatacatttattagtgatagaacgtttaacgaggacttattcagagttgttgttcaaatagatcccgaatatttcgataatgaacgaattatgtctttattctctacgagtgctgcggacattaaacgatttgatgagttagatattaataacagttatatatctaatataatttatgaggtgaacgatatcacattagatacaatggatgatatgaagaagtgtcaaatctttaacgaggatacgtcgtattatgttaaggaatacaatacatacctgtttttgcacgagtcggatcccatggtcatagagaacggaatactaaagaaactgtcatctataaaatccaagagtagacggctgaacttgtttagcaaaaacattttaaaatattatttagacggacaattggctcgtctaggtcttgtgttagatgattataaaggagacttgttagttaaaatgataaaccatcttaagtctgtggaggatgtatccgcattcgttcgattttctacagataaaaaccctagtattcttccatcgctaatcaaaactattttagctagttataatatttccatcatcgtcttatttcaaaggtttttgagagataatctatatcatgtagaagaattcttggataaaagcatccatctaaccaagacggataagaaatatatacttcaattgataagacacggtagatcatagaacagaccaaatatattattaataatttgtatatacatagatataattatcacacatttttgataaatgggaactgctgcaacaattcagactcccaccaaattaatgaataaagaaaatgcagaaatgattttggaaaaaattgttgatcatatagttatgtatattagtgacgaatcaagtgattcagaaaataatcctgaatatattgattttcgtaacagatacgaagactatagatctctcattataaaaagtgatcacgagtttgtaaagctatgtaaaaatcatgcggagaaaagttctccagaaacgcaacaaatgattatcaaacacatatacgaacaatatcttattccagtatctgaagtactattaaaacctataatgtccatgggtgacataattacatataacggatgtaaagacaatgaatggatgctagaacaactctctaccctaaactttaacaatctccgcacatggaactcatgtagcataggcaatgtaacgcgtctgttttatacattttttagttatctgatgaaagataaactaaatatataagtataatcccattctaatactttaacctgatgtattagcatcttattagaatattaacctaactaaaagacataacataaaaactcattacatagttgataaaaagcggtaggatataaatattatggctgccaccgttccgcgttttgacgacgtgtacaaaaatgcacaaagaagaattctagatcaagaaacattttttagtagaggtctaagtagaccgttaatgaaaaacacatatctatttgataattacgcgtatggatggataccagaaactgcaatttggagtagtagatacgcaaacctagatgctagtgactattatcccatttcgttgggattacttaaaaagttcgagtttctcatgtctctatataaaggtcctattcccgtatatgaagaaaaagtaaatactgaattcatagccaatggatcgttctctggtagatacgtatcatatcttcgaaagttttctgcccttccaacaaacgagtttattagttttttgttactgacttccattccaatctataatatcttgttctggtttaaaaacacacagtttgatattactaaacacacattattcagatacgtctatacagataatgccaaacacctggcgttggctaggtatatgcatcaaacaggagactataagcctttgtttagtcgtctcaaagagaattatatatttaccggtcccgttccaataagtatcaaagatatagatcaccctaatcttagtagagcaagaagtccatccgattatgagacattagctaatattagtactatattgtactttaccaagtatgatccggtattaatgtttttattgttttacgtacctgggtattcaattactacaaaaattactccagccgtagaatatctaatggataaactgaatctaacaaagagcgacgtacaactgttgtaaattattttatgcttcgtaaaatgtaggttttgaaccaaacattctttcaaagaatgagatgcataaaactttattatccaatagattgactatttcggacgtcaatcgtttaaagtaaacttcgtaaaatattctttgatcactgccgagtttaaaacttctatcgataattgtctcatatgttttaatatttacaagttttttggtccatggtacattagccggacaaatatatgcaaaataatatcgttctccaagttctatagtttctggattatttttattatattcagtaactaaatacatattagggttatctgcggatttataatttgagtgatgcattctactcaacataaataattctagaggagacgatctactatcaaattcggatcgtaaatctgtttctaaagaacggagaatatctatacatacctgattagaattcatccgtccttcagacaacatctcagacagtctggttttgtacatcttaatcatattcttatgaaacttggaaacatctcttctagtttcactagtacctttattaattctctcaggtacagattttgaattcgacgatgctgagtatttcatcgttgtatatttcttcttcgattgcataatcagattcttatataccgcctcaaactctattttaaaattattaaacaatactctattattaatcagtcgttctaactctttcgctatttctatagacttatctacatcttgactgtctatctctgtaaacacggagtcggtatctccatacacgctacgaaaacgaaatctgtaatctataggcaacgatgttttcacaatcggattaatatctctatcgtccatataaaatggattacttaatggattggcaaaccgtaacataccgttagataactctgctccatttagtaccgattctagatacaagatcattctacgtcctatggatgtgcaactcttagccgaagcgtatgagtatagagcactatttctaaatcccatcagaccatatactgagttggctactatcttgtacgtatattgcatggaatcatagatggccttttcagttgaactggtagcctgttttagcatctttttatatctggctctctctgccaaaaatgttcttaatagtctaggaatggttccttctatcgatctatcgaaaattgctatttcagagatgaggttcggtagtctaggttcacaatgaaccgtaatatatctaggaggtggatatttctgaagcaatagctgattatttatttcttcttccaatctattggtactaacaacgacaccgactaatgtttccggagatagatttccaaagatacacacattaggatacagactgttataatcaaagattaatacattattactaaacattttttgttttggagcaaataccttaccgccttcataaggaaacttttgttttgtttctgatctaactaagatagttttagtttccaacaatagctttaacagtggacccttgatgactgtactcgctctatattcgaataccatggattgaggaagcacatatgttgacgcacccgcgtctgtttttgtttctactccataatactcccacaaatactgacacaaacaagcatcatgaatacagtatctagccatatctaaagctatgtttagattataatccttatacatctgagctaaatcaacgtcatcctttccgaaagataatttatatgtatcattaggtaaagtaggacataatagtacgactttaaatccattttcccaaatatctttacgaattactttacatataatatcctcatcaacagtcacataattacctgtggttaaaacctttgcaaatgcagcggctttgcctttcgcgtctgtagtatcgtcaccgatgaacgtcatttctctaactcctctatttaatactttacccatgcaactgaacgcgttcttggatatagaatccaatttgtacgaatccaatttttcaaatttttgaatgaatgaatatagatcgaaaaatatagttccattattgttattaacgtgaaacgtagtattggccatgccgcctactcccttatgactagactgatttctctcataaatacagagatgtacagcttcctttttgtccggagatctaaagataattttctctcctgttaataactctagacgattagtaatatatctcagatcaaagttatgtccgttaaaggtaacgacgtagtcgaacgttagttccaacaattgtttagctattcgtaacaaaactatttcagaacatagaactagttctcgttcgtaatccatttccattagtgactgtatcctcaaacatcctctatcgacggcttcttgtatttcctgttccgttaacatctcttcattaatgagcgtaaacaataatcgtttaccacttaaatcgatataacagtaacttgtatgcgagattgggttaataaatacagaaggaaacttcttatcgaagtgacactctatatctagaaataagtacgatcttgggatatcgaatctaggtatttttttagcgaaacagttacgtggatcgtcacaatgataacatccattgttaatctttgtcaaatattgctcgtccaacgagtaacatccgtctggagatatcccgttagaaatataaaaccaactaatattgagaaattcatccatggtggcattttgtatgctgcgtttctttggctcttctatcaaccacatatctgcgacggagcattttctatctttaatatctagattataacttattgtctcgtcaatgtctatagttctcatctttcccaacggcctcgcattaaatggaggaggagacaatgactgatatatttcgtccgtcactacgtaataaaagtaatgaggaaatcgtataaatacggtctcgccatttcgacatctggatttcagatataaaaatctgttttcaccgtgactttcaaaccaattaatgcaccgaacatccatttatagaatttagaaatatattttcatttaaatgaatcccaaacattggggaagagccgtatggaccattatttttatagtactttcgcaagcgggtttagacggcaacatagaagcgtgtaaacgaaaactatatactatagttagcactcttccatgtcctgcatgtagacggcacgcgactatcgctatagaggacaataatgtcatgtctagcgatgatctgaattatatttattattttttcatcagattatttaacaatttggcatctgatcccaaatacgcgatcgatgtgacaaaggttaaccctttataaacttaacccattataaaacttatgattagtcacaactgaaataaccgcgtgattattttttggtataattctacacggcatggtttctgtgactatgaattcaacccccgttacattagtgaaatctttaacaaacagcaagggttcgtcaaagacataaaactcattgtttacaatcgaaatagaccccctatcacacttaaaataaaaaatatccttatcctttaccaccaaataaaattctgattggtcaatgtgaatgtattcacttaacagttccacaaatttatttattaactccgaggcacatacatcgtcggtattttttatggcaaactttactcttccagcatccgtttctaaaaaaatattaacgagttccatttatatcatccaatattattgaaatgacgttgatggacagatgatacaaataagaaggtacggtacctttgtccaccatctcctccaattcatgctctattttgtcattaactttaatgtatgaaaacagtacgccacatgcttccatgacagtgtgtaacactttggatacaaaatgtttgacattagtataattgtccaagactgtcaatctataatagatagtagctataatatattctatgatggtattgaagaagatgacaaccttggcatattgatcatttaacacagacatggtatcaacagatagcttgaatgaaagagaatcagtaattggaataagcgtcttctcgatagagtgtccgtataccaacatgtctgatattttgatgtattccattaaattatttagttttttctttttattctcgttaaacagcatttctgtcaacggaccccaacatcgttgaccgattaagttttgattgatttttccgtgtaaggcgtatctagtcagatcgtatagcctatccaataatccatcgtctgtgtgtagatcacatcgtacactttttaattctctatagaagagcgacagacatctggagcaattacagacagcaatttctttattctctacagatgtaagatacttgaagacattcctatgatgatgcagaattttggataacacggtattgatggtatctgttaccataattcctttgatggctgatagtgtcagagcacaagatttccaatctttgacaatttttagcaccattatctttgttttgatatctatatcagacagcatggtgcgtctgacaacacagggattaagacggaaagatgaaatgattctctcaacatcttcaatagataccttgctattttttctggcattatctatatgtgcgagaatatcctctagagaatcagtatcctttttgatgatagtggatctcaatgacatgggacgtttaaaccttcttattctatcaccagattgcatggtgatttgtcttctttcttttatcataatgtaatctctaaattcatcggcaaattgtctatatctaaaatcataatatgagatgtttacctctacaaatatctgttcgtccaatgttagagtatttacatcagttttgtattccaaattaaacatggcaacggatttaattttatattcctctattaagtcctcgtcgataataacagaatgtagataatcatttaatccgtcgtacatggttggaagatgcttgttgacaaaatctttaattgtcttgatgaaggtgggactatatctaacatcttgattaataaaatttataacattgtccataggatactttgtaactagttttatacacatctcttcatcggtaagtttagacagaatatcgtgaacaggtggtatattatattcatcagatatacgaagaacaatgtccaaatctatattgtttaatatattatatagatgtagcgtagctcctacaggaatatctttaactaagtcaatgatttcatcaaccgttagatctattttaaagttaatcatataggcattgatttttaaaaggtatgtagccttgactacattctcattaattaaccattccaagtcattgtgtgtaagaagattatattctatcataagcttgactacatttggtcccgataccattaaagaattcttatgatataaggaaacagattttaggtactcatctactctacaagaattttggagagccttaacgatatcagtgacgtttattatttcaggaggaaagaatctaacattgagaatatcggaattaatagcttccagatacagtgattttggcaatagtccgtgtaatccataatccagtaacacgagctggtgcttgctagacaccttttcaatgtttaatttttttgaaataagctttgataaagccttcctcgcaaattccggatacatgaacatgtcggcgacatgattaagtattgttttttcattatttttatattttctcaacaagttctcaataccccaatagatgatagaatatcacccaatgcgtccatgttgtctatttccaacaggtcgctatatccaccaatagaagtttttccaaaaaagattctaggaacagttctaccaccagtaatttgttcaaaataatcccgcaattcattttcgggtttaaattctttaatatcgacaatttcatacgctcctcttttgaaactaaacttatttagaatatccagtgcatttctacaaaaaggacatgtatacttgacaaaaattgtcactttgttattggccaacctttgttgtacaaattcctcggccattttaatatttaagtgatataaaactatctcgacttatttaactctttagtcgagatatatggacgcagatagctatatgatagccaactacagaaggcaaacgctataaaaaacataattacgacgagcatatttataaatatttttattcagcattacttgatatagtaatattaggcacagtcaaacattcaaccactctcgatacattaactctctcattttctttaacaaattctgcaatatcttcgtaaaaagattcttgaaactttttagaatatctatcgactctagatgaaatagcgttcgtcaacatactatgttttgtatacataaaggcgcccattttaacagtttctagtgacaaaatgctagcgatcctaggatcctttagaatcacatagattgacgattcgtctctcttagtaactctagtaaaataatcatacaatctagtacgcgaaataatattatccttgacttgaggagatctaaacaatctagttttgagaacatcgataagttcatcgggaatgacatacatactatctttaatagaactcttttcatccagttgaatggattcgtccttaaccaactgattaatgagatcttctattttatcattttccagatgatatgtatgtccattaaagttaaattgtgtagcgcttctttttagtctagcagccaatactttaacatcactaatatcgatatacaaaggagatgatttatctatggcattaagaattcgtttttcgacatccgtcaaaaccaattcctttttgcctgtatcatccagttttccatcctttgtaaagaaattattttctactagactattaataagactgataaggattcctccataattgcacaatccaaactttttaacaaaactagactttacgagatctacaggaatgcgtacttcaggttttttagcttgtgattttttcttttgcggacattttctagtaaccaactcatctaccatttcattgattttagcagtgaaataagctttcaatgcacgggcactgatactattgaaaacgagttgatcttcaaattccgccatttaagttcaccaaacaacttttaaatacaaatatatcaatagtagtagaataagaactataaaaaaaataataattaaccaaccccaacaaccggtattattagttgatgtggtagttttctcatcacttagaacagatttaacaatttctataaagtctgtcaaatcatcttccggagaccccataaatacaccaaatatagcggcgtacaacttatccatttatacattgaatattggcttttctttatcgctatcttcatcatattcatcatcaatatcaacaagtcccagattacgagccagatcttcttctacattttcagtcattgatacacgttcactatctccagagagtccgataacgttagccaccacttctctatcaatgattagtttcttgagcgcgaaagtaatttttgtttccgttccggatctatagaagacgataggtgtgataattgccttggccaattgtctttctcttttactgagtgattctagttcaccttctatagatctgagaatggatgattctccagtcgaaacatattctaccatggatccgtttaatttgttgatgaagatggattcatccttaaatgttttctctgtaatagtttccaccgaaagactatgcaaagaatttggaatgcgttccttgtgcttaatgtttccatagacggcttctagaagttgatacaacataggactagccgcggtaacttttatttttagaaagtatccatcgcttctatcttgtttagatttatttttataaagtttagtctctccttccaacataataaaagtggaagtcatttgactagataaactatcagtaagttttatagagatagacgaacaattagcgtattgagaagcatttagtgtaacgtattcgatacattttgcattagatttactaatcgattttgcatactctataacacccgcacaagtctgtagagaatcgctagatgcagtaggtcttggtgaagtttcaactctcttcttgattaccttactcatgattaaacctaaataattgtactttgtaatataatgatatatattttcactttatctcatttgagaataaaaatgtttttgtttaaccactgcatgatgtacagatttcggaatcgcaaaccaccagtggttttattttatccttgtccaatgtgaattgaatgggagcggatgcgggtttcgtacgtagatagtacattcccgtttttagaccgagactccatccgtaaaaatgcatactcgttagtttggaataactcggatctgctatatggatattcatagattgactttgatcgatgaaggctcccctgtctgcagccatttttatgatcgtcttttgtggaatttcccaaatagttttataaactcgcttaatatcttctggaaggtttgtattctgaatggatccaccatctgccataatcctattcttgatctcatcattccataattttctctcggttaaaactctaaggagatgcggattaactacttgaaattctccagacaatactctccgagtgtaaatattactggtatacggttccaccgactcattatttcccaaaatttgagcagttgatgcagtcggcataggtgccaccaataaactatttctaagaccgtatgttctgattttatcttttagaggttcccaattccaaagatccgacggtacaacattccaaagatcatattgtagaataccgttactggcgtacgatcctacatatgtatcgtatggtccttccttctcagctagttcacaactcgcctctaatgcaccgtaataaatggtttcgaagatcttcttatttagatcttgtgcttccaggctatcaaatggataatttaagagaataaacgcgtccgctaatccttgaacaccaataccgataggtctatgtctcttattagagatttcagcttctggaataggataataattaatatctataattttattgagatttctgacaattactttgaccacatccttcagtttgagaaaatcaaatcgcccatctattacaaacatgttcaaggcaacagatgccagattacaaacggctacctcattagcatccgcatattgtattatctcagtgcaaagattactacacttgatagttcctaaattttgttgattactctttttgttacacgcatccttataaagaatgaatggagtaccagtttcaatctgagattctataatcgctttccagacgactcgagcctttattatagatttgtatctcctttctctttcgtatagtgtatacaatcgttcgaactcgtctccccaaacattgtccaatccaggacattcatccggacacatcaacgaccactctccgtcatccttcactcgtttcataaagagatcaggaatccaaagagctataaatagatctctggttctatgttcctcgtttcctgtattctttttaagatcgaggaacgccataatatcagaatgccacggttccaagtatatggccataactccaggccgtttgtttcctccctgatctatgtatctagcggtgttattataaactctcaacattggaataataccgtttgatataccattggtaccggagatatagcttccactggcacgaatattactaattgatagacctattccccctgccattttagagattaatgcgcatcgttttaacgtgtcatagataccctctatgctatcatcgatcatgttaagtagaaaacagctagacatttggtgacgactagttcccgcattaaataaggtaggagaagcgtgcgtaaaccatttttcagaaagtagattgtacgtctcaatagctgagtctatatcccattgatgaattcctactgcgacacgcattaacatgtgctgaggtctttcaacgatcttgttgtttattttcaacaagtaggatttttccaaagttttaaaaccaaaatagttgtatgaaaagtctcgttcgtaaataataaccgagttgagtttatccttatatttgttaactatatccatggtgatacttgaaataatcggagaatgtttcccatttttaggattaacatagttgaataaatcctccatcacttcactaaatagtttttttgtttccttgtgtagatttgatacggctattctggcggctagaatggcataatccggatgttgtgtagtacaagtggctgctatttcggctgccagagtgtccaattctaccgttgttactccattatatattccttgaataaccttcatagctattttaataggatctatatgatccgtgtttaagccataacataattttctaatacgagacgtgattttatcaaacatgacattttccttgtatccatttcgtttaatgacaaacatttttgttggtgtaataaaaaaattatttaacttttcattaatagggatttgacgtatgtagcgtacaaaatgattgttcctggtatatagataaagagtcctatatatttgaaaatcgttacggctcgattaaactttaatgattgcatagtgaatatatcattaggatttaactccttgactatcatggcggcgccagaaattaccatcaaaagcattaatacagttataccgatcgcagttagaacggttatagcatccaccatttatatctaaaaattagatcaaagaatatgtgacaaagtcctagttgtatactgagaattgacgaaacaatgtttcttacatatttttttcttattagtaaccgacttaatagtaggaactggaaaactagacttgattattctataagtatagatacccttccaaataatattctctttgataaaagttccagaaaatgtagaattttttaaaaagttatcttttgctattaccaagattgtgtttagacgcttattattaatatgagtgatgaaatccacaccgcctctagatatcgcctttatttccacattagatggtaaatccaatagtgaaactatctttttaggaatgtatggactcgcgtttagaggagtaaacgtcttaggcgtcggaaaggatgattcatcaaacgaataaacaatttcacaaatggatgttaatgtattagtaggaaattttttgacgctattggaattgaagattctaatggatgatgttctacctatttcatccgataacatgttaatttccgacaccaacggttttaatatttcgatgatatacggtagtctctctttcggacttatatagcttattccacaatacgagtcattatatactccaaaaaacaaaataactagtataaaatctgtatcgaatgggaaaaacgaaattatcgacataggtatagaatccggaacattgaacgtattaatacttaattctttttctgtggtaagtaccgataggttattgacattgtatggttttaaatattctataacttgagacttgatagatattagtgatgaattgaaaattatttttatcaccacgtgtgtttcaggatcatcgtcgacgcccgtcaaccaaccgaacggagtaaaataaatatcattaatatatgctctagatattagtatttttatcaatcctttgattatcatcttctcgtaggcgaatgattccatgatcaagagtgatttaagaacatcctccggagtattaatgggcttagtaaacagtccatcgttgcaataataaaagttatccaagttaaaggatattatgcattcgtttaaagatatcacctcatctgacggagacaattttttggtaggttttagagactttgaagctacttgtttaacaaagttattcatcgtcgtctactattctatttaattttgtagttaatttatcacatatcacattaattgactttttggtccacttttccatacgtttatattcttttaatcctgcgttatccgtttccgttatatccagggatagatcttgcaagttaaatagaatgctcttaaataatgtcattttcttatccgctaaaaatttaaagaatgtataaacctttttcagagatttgaaactcttaggtggtgtcctagtacacaatatcataaacaaactaataaacattccacattcagattccaacagctgattaacttccacattaatacagcctattttcgctccaaatgtacattcgaaaaatctgaataaaacatcgatgtcacaatttgtattatccaatacagaatgtttgtgattcgtgttaaaaccatcggagaaggaatagaaataaaaattattatagtggtggaattcagttggaatattgcctccggagtcataaaaggatactaaacattgttttttatcataaattacacatttccaatgagacaaataacaaaatccaaacattacaaatctagaggtagaacttttaattttgtctttaagtatatacgataagatatgtttattcataaacgcgtcaaatttttcatgaatcgctaaggagtttaagaatctcatgtcaaattgtcctatataatccacttcggatccataagcaaactgagagactaagttcttaatacttcgattgctcatccaggctcctctctcaggctctattttcatcttgacgacctttggattttcaccagtatgtattcctttacgtgataaatcatcgattttcaaatccatttgtgagaagtctatcgccttagatactttttcccgtagtcgaggtttaaaaaaatacgctaacggtatactagtaggtaactcaaagacatcatatatagaatggtaacgcgtctttaactcgtcggttaactctttcttttgatcgagttcgtcgctactattgggtctgctcaggtgccccgactctactagttccaacatcataccgataggaatacaagacactttgccggcggttgtagatttatcatatttttccactacatatccgttacaatttgttaaaaatttagatacatctatattgctacataatccagctagtgaatatatatgacataataaattggtaaatcctagttctggtattttactaattactaaatctgtatatctttccatttatcatggaaaagaatttaccagatatcttcttttttccaaactgcgttaatgtattctcttacaaatattcacaagatgaattcagtaatatgagtaaaacggaacgtgatagtttctcattggccgtgtttccagttataaaacatagatggcataacgcacacgttgtaaaacataaaggaatatacaaagttagtacagaagcacgtggaaaaaaagtatctcctccatcactaggaaaacccgcacacataaacctaaccgcgaagcaatatatatacagtgaacacacaataagctttgaatgttatagttttctaaaatgtataacaaatacagaaatcaattcgttcgatgagtatatattaagaggactattagaagctggtaatagtttacagatattttccaattccgtaggtaaacgaacagatactataggtgtactagggaataagtatccatttagcaaaattccattggcctcattaactcctaaagcacaacgagagatattttcagcgtggatttctcatagacctgtagttttaactggaggaactggagtgggtaagacgtcacaggtacccaagttattgctttggtttaattatttatttggtggattctctactctagataaaatcactgactttcacgaaagaccagtcattctatctcttcctaggatagctttagttagattgcatagcaataccattttaaaatcattgggatttaaggtactagatggatctcctatttctttacggtacggatctataccggaagaattaataaacaaacaaccaaaaaaatatggaattgtattttctacccataagttatctctaacaaaactatttagttatggcactcttattatagacgaagttcatgagcatgatcaaataggagatattattatagcagtagcgagaaagcatcatacgaaaatagattctatgtttttaatgactgccacgttagaggatgacagggaacggctaaaagtatttttacctaatcccgcatttatacatattcctggagatacactgtttaaaattagcgaggtatttattcataataagataaatccatcttccagaatggcatacatagaagaagaaaagagaaatttagttactgctatacagatgtatactcctcctgatggatcatccggtatagtctttgtggcatccgttgcacagtgtcacgaatataaatcatatttagaaaaaagattaccgtatgatatgtatattattcatggtaaggtcttagatatagacgaaatattagaaaaagtgtattcatcacctaatgtatcgataattatttctactccttatttggaatccagcgttactatacgcaatgttacacacatttatgatatgggtagagtttttgtccccgctccttttggaggatcgcaacaatttatttctaaatctatgagagatcaacgaaaaggaagagtaggaagagttaatcctggtacatacgtctatttctatgatctgtcttatatgaagtctatacagcgaatagattcagaatttctacataattatatattgtacgctaataagtttaatctaacactccccgaagatttgtttataatccctacaaatttggatattctatggcgtacaaaggaatatatagactcgttcgatattagtacagaaacatggaataaattattatccaattattatatgaagatgatagagtatgctaaactttatgtactaagtcctattctcgctgaggagttggataactttgagaggacgggagaattaactagtattgtacgagaagccattttatctctaaatttacaaattaagattttaaattttaaacataaagatgatgatacgtatatacacttttgtaaaatattattcggtgtctataacggaacaaacgctactatatattatcatagacctctaacgggatatatgaatatgatttcagatactatatttgttcctgtagataataactaaaaatcaaactctaatgaccacatctttttttagagatgaaaaattttccacatctccttttgtagacacgactaaacattttgcagaaaaaagtttattagtgtttagataatcgtatacttcatcagtgtagatagtaaatgtgaacagataaaaggtattcttgctcaatagattggtaaattccatagaatatattaatcctttcttcttgagatcccacatcatttcaaccagagacgttttatccaatgatttacctcgtactataccacatacaaaactagattttgcagtgacgtcgtacctggtattcctaccaaacaaaattttacttttagttcttttagaaaattctaaggtagaatctctatttgccaatatgtcatctatggaattaccactagcaaaaaatgatagaaatatatattgatacatcgcagctggttttgatctactatactttaaaaacgaatcagattccataattgcctgtatatcatcagctgaaaaactatgttttacacgtattccttcggcatttctttttaatgatatatcttgtttagacaatgataaagttatcatgtccatgagagacgcgtctccgtatcgtataaatatttcattagatgttagacgcttcattaggggtatacttctataaggtttcttaatcagtccatcattggttgcgtcaagaactactatcggatgttgttgggtatctctagtgttacacatggccttactaaagtttgggtaaataactatgatatctctattaattatagatgcatatatttcattcgtcaaggatattagtatcgacttgctatcgtcattaatacgtgtaatgtaatcatataaatcatgcgatagccaaggaaaatttaaatagatgttcatcatataatcgtcgctataattcatattaatacgttgacattgactaatttgtaatatagcctcgccacgaagaaagctctcgtattcagtttcatcgataaaggataccgttaaatataactggttgccgatagtctcatagtctattaagtggtaagtttcgtacaaatacagaatccctaaaatattatctaatgttggattaatctttaccataactgtataaaatggagacggagtcataactattttaccgtttgtacttactggaatagatgaaggaataatctccggacatgctggtaaagacccaaatgtctgtttgaagaaatccaatgttccaggtcctaatctcttaacaaaaattacgatattcgatcccgatatcctttgcattctatttaccagcatatcacgaactatattaagattatctatcatgtctattctcccaccgttatataaatcgcctccgctaagaaacgttagtatatccatacaatggaatacttcatttctaaaatagtattcgttttctaattctttaatgtgaaatcgtatactagaaagggaaaaattatctttgagttttccgttagaaaagaaccacgaaactaatgttctgattgcgtccgattccgttgctgaattaatggatttacaccaaaaactcatataacttctagatgtagaagcattcgctaaaaaattagtagaatcaaaggatataagtagatgttccaacaagtgagcaattcccaagatttcatctatatcattctcgaatccgaaattagaaattcccaagtagatatcctttttcatccgatcgttgatgaaaatacgaactttattcggtaagacaatcatttactaaggagtaaaataggaagtaatgttcgtatgtcgttatcatcgtataaattaaaggtgtgttttttaccattaagtgacattataattttaccaatattggaattataatataggtgtatttgcgcactcgcgacggttgatgcatcggtaaatatagctgtatctaatgttctagtcggtatttcatcatttcgctgtctaataatagcgttttctctatctgtttccattacagctgcctgaagtttattggtcggataatatgtaaaataataagaaatacatacgaataacaaaaataaaataagatataataaagatgccatttagagatctaattttgtttaacttgtccaaattcctacttacagaagatgaggaatcgttggagatagtgtcttccttatgtagaggatttgaaatatcttataatgacttgataacttactttccagataggaaataccataaatatatttataaagtatttgaacatgtagatttatcggaggaattaagtatggaattccatgatacaactctgagagatttagtctatcttagattgtacaagtattccaagtgtatacggccgtgttataaattaggagataatctaaaaggcatagttgttataaaggacaggaatatttatattagggaagcaaatgatgacttgatagaatatctcctcaaggaatacactcctcagatttatacatattctaatgagcgcgtccccataactggttcaaaattaattctttgtggattttctcaagttacatttatggcgtatacaacgtcgcatataacaacaaataaaaaggtagatgttctcgtttccaaaaaatgtatagatgaactagtcgatccaataaattatcaaatacttcaaaatttatttgataaaggaagcggaacaataaacaaaatactcaggaagatattttattcggtaacaggtggccaaactccataggtagctttttctatttcggattttagaatttccaaattcaccagcgatttatcggttttggtgaaatccaaggatttattaatgtccacaaatgccatttgttttgtctgtggattgtatttgaaaatggaaacgatgtagttagatagatgcgctgcgaagtttcctattagggttccgcgcttcacgtcacccagcatacttgaatcaccatcctttaaaaaaaatgataagatatcaacatggagtatatcatactcgaattttaattcttctactgactcactgacattttcacaaatactacaatacggtttaccgaaaataatcagtacgttcttcatttatgggtatcaaaaacttaaaatcgttactgctggaaaataaatcactgacgatattagatgataatttatacaaagtatacaatggaatatttgtggatacaatgagtatttatatagccgtcgccaattgtgtcagaaacttagaagagttaactacggtattcataaaatacgtaaacggatgggtaaaaaagggagggcatgtaaccctttttatcgatagaggaagtataaaaattaaacaagacgttagagacaagagacgtaaatattctaaattaaccaaggacagaaaaatgttagaattagaaaagtgtacatccgaaatacaaaatgttaccggatttatggaagaagaaataaaggcagaaatgcaattaaaaatcgataaactcacatttcaaatatatttatctgattctgataacataaaaatatcattgaatgagatactaacacatttcaacaataatgagaatgttacattattttattgtgatgaacgagacgcagaattcgttatgtgtctcgaggctaaaacacatttctctaccacaggagaatggccgttgataataagtaccgatcaggatactatgctatttgcatctgctgataatcatcctaagatgataaaaaacttaactcaactgtttaaatttgttccctcggcagaggataactatttagcaaaattaacggcgttagtgaatggatgtgatttctttcctggactctatggggcatctataacacccaccaacttaaacaaaatacaattgtttagtgattttacaatcgataatatagtcactagtttggcaattaaaaattattatagaaagactaactctaccgtagacgtgcgtaatattgttacgtttataaacgattacgctaatttagacgatgtctactcgtatattcctccttgtcaatgcactgttcaagaatttatattttccgcattagatgaaaaatggaatgaatttaaatcatcttatttagaaagcgtgccgttaccctgccaattaatgtacgcgttagaaccacgcaaggagattgatgtttcagaagttaaaactttatcatcttatatagatttcgaaaatactaaatcagatatcgatgttataaaatctatatcctcgatcttcggatattctaacgaaaactgtaacacgatagtattcggcatctataaggataatttactactgagtataaataattcattttactttaacgatagtctgttaataaccaatactaaaagtgataatataataaatataggttactagattaaaaatggtgttccaactcgtgtgctctacatgcggtaaagatatttctcacgaacgatataaattgattatacgaaaaaaatcattaaaggatgtactcgtcagtgtaaagaacgaatgttgtaggttaaaattatctacacaaatagaacctcaacgtaacttaacagtgcaacctctattggatataaactaatatggatccggttaattttatcaagacatatgcgcctagaggttctattatttttattaattataccatgtcattaacaagtcatttgaatccatcgatagaaaaacatgtgggtatttattatggtacgttattatcggaacacttggtagttgaatctacctatagaaaaggagttcgaatagtcccattggatagtttttttgaaggatatcttagtgcaaaagtatacatgttagagaatattcaagttatgaaaatagcagctgatacgtcattaactttattgggtattccgtatggatttggtcatgatagaatgtattgttttaaattggtagctgactgttataaaaatgccggtattgatacatcgtctaaacgaatattgggcaaagatatttttctgagccaaaacttcacagacgataatagatggataaagatatatgattctaataatttaacattttggcaaattgattaccttaaagggtgagttaatatgcataactactcctccgttgttttttccctcgttctttttcttaacgttgtttgccatcactctcataatgtaaagatattctaaaatggtaaacttttgcatatcggacgcagaaattggtataaatgttgtaattgtattatttcccgtcaatggactagtcacagctccatcagttttatatcctttagagtatttctcactcgtgtctaacattctagagcattccatgatctgtttatcgttgatattggccggaaagatagattttttattttttattatattactattggcaattgtagatataacttctggtaaatatttttctaccttttcaatctcttctattttcaagccggctatatattctgctatattgttgctagtatcaataccttttctggctaagaagtcatatgtggtattcactatatcagttttaactggtagttccattagcctttccacttctgcagaataatcagaaattggttctttaccagaaaatccagctactataataggctcaccgatgatcattggcaaaatcctatattgtaccagattaatgagagcatatttcatttccaataattctgctagttcttgagacattgatttatttgatgaatctagttggttctctagatactctaccatttctgccgcatacaataacttgttagataaaatcagggttatcaaagtgtttagcgtggctagaatagtgggcttgcatgtattaaagaatgcggtagtatgagtaaaccgttttaacgaattatatagtctccagaaatctgtggcgttacatacatgagccgaatgacatcgaagattgtccaatatttttaatagctgctctttgtccattatttctatatttgactcgcaacaattgtagataccattaatcaccgattcctttttcgatgccggacaatagcacaattgtttagctttggactctatgtattcagaattaatagatatatctctcaatacagattgcactatacattttgaaactatgtcaaaaattgtagaacgacgctgttctgcagccatttaactttaaataatttacaaaaatttaaaatgagcatccgtataaaaatcgataaactgcgccaaattgtggcatatttttcagagttcagtgaagaagtgtctataaatgtagactcgacggatgagttaatgtatatttttgccgccttgggcggatctgtaaacatttgggcaattatacctctaagtgcatcagtgttttaccgaggagccgaaaatattgtgtttaatcttcctgtgtccaaggtaaaatcgtgtttgtgtagttttcacaatgatgccatcatagatatagaacctgatctggaaaataatctagtaaaactttctagttatcatgtagtaagtgtcgattgtaacaaggaactgatgcctattaggacagatactactatttgtctaagtatagatcaaaagaaatcttacgtgtttaattttcacaagtatgaagaaaaatgttgtggtagaaccgtcattcatctagaatggttgttgggctttatcaagtgtattagtcagcatcagcatctggctattatgtttaaagatgacaatattattatgaagactcctggtaatactgatgcgttttccagggaatattctatgactgaatgttctcaagaactacaaaagttttctttcaaaatagctatctcgtctctcaacaaactacgaggattcaaaaagagagtcaatgtttttgaaactagaatcgtaatggataatgacgataacattttaggaatgttgttttcggatagagttcaatcctttaagatcaacatctttatggcgtttttagattaatactttcaatgagataaatatgggtggcggagtaagtgttgagctccctaaacgggatccgcctccgggagtacccactgatgagatgttattaaacgtggataaaatgcatgacgtgatagctcccgctaagcttttagaatatgtgcatataggaccactagcaaaagataaagaggataaagtaaagaaaagatatccagagtttagattagtcaacacaggacccggtggtctttcggcattgttaagacaatcgtataatggaaccgcacccaattgctgtcgcacttttaatcgtactcattattggaagaaggatggaaagatatcagataagtatgaagagggtgcagtattagaatcgtgttggccagacgttcacgacactggaaaatgcgatgttgatttattcgactggtgtcagggggatacgttcgatagaaacatatgccatcagtggatcggttcagcctttaataggagtaatagaactgtagagggtcaacaatcgttaataaatctgtataataagatgcaaacattatgtagtaaagatgctagtgtaccaatatgcgaatcatttttgcattatttacgcgcacacaatacagaagatagcaaagagatgatcgattatattctaagacaacagtctgcggactttaaacagaaatatatgagatgtagttatcccactagagataagttagaagagtcattaaaatatgcggaacctcgagaatgttgggatccagagtgttcgaatgccaatgttaatttcttactaacacgtaattataataatttaggactttgcaatattgtacgatgtaataccagcgtgaacaacttacagatggataaaacttcctcattaagattgtcatgtggattaagcaatagtgatagattttctactgttcccgtcaatagagcaaaagtagttcaacataatattaaacactcgttcgacctaaaattgcatttgatcagtttattatctctcttggtaatatggatactaattgtagctatttaaatgggtgccgcggcaagcatacagacgacggtgaatacactcagcgaacgtatctcgtctaaattagaacaagaagcgaacgctagtgctcaaacaaaatgtgatatagaaatcggaaatttttatatccgacaaaaccatggatgtaacctcactgttaaaaatatgtgctctgcggacgcggatgctcagttggatgctgtgttatcagccgctacagaaacatatagtggattaacaccggaacaaaaagcatacgtgccagctatgtttactgctgcgttaaacattcagacgagtgtaaacactgttgttagagattttgaaaattatgtgaaacagacttgtaattctagcgcggtcgtcgataacaaattaaagatacaaaacgtaatcatagatgaatgttacggagccccaggatctccaacaaatttggaatttattaatacaggatctagcaaaggaaattgtgccattaaagcgttgatgcaattgacgactaaggccactactcaaatagcacctagacaagttgctggtacaggagttcagttttatatgattgttatcggtgttataatattggcagcgttgtttatgtactatgccaagcgtatgttgttcacatccaccaatgataaaatcaaacttattttagccaataaggaaaacgtccattggactacttacatggacacattctttagaacttctccgatggttattgctaccacggatatgcaaaactgaaaatatattgataatattttaatagattaacatggaagttatcgctgatcgtctagacgatatagtgaaacaaaatatagcggatgaaaaatttgtagattttgttatacacggtctagagcatcaatgtcctgctatacttcgaccattaattaggttgtttattgatatactattatttgttatagtaatttatatttttacggtacgtctagtaagtagaaattatcaaatgttgttggtggtgctagtcatcacattaactattttttattactttatactataatagtactagactgacttctaacaaacatctcacctgccataaataaatgcttgatattaaagtcttctatttctaacactattccatctgtggaaaataatactctgacattatcgctaattgacacatcggtgagtgatatgcctataaagtaataatcttctttgggcacatataccagtgtaccaggttctaacaacctatttactggtgctcctgtagcatactttttctttaccttgagaatatccatcgtttgcttggtcaatagcgatatgtgattttttatcaaccactcaaaaaagtaattggagtgttcatatcctctacgggctattgtctcatggccgtgtatgaaatttaagtaacacgactgtggtagatttgttctatagagccgattgccgcaaatagatagaactaccaatatgtctgtacaaatgttaaacattaattgattaacagaaaaaacaatgttcgttctgggaatagaaaccagatcaaaacaaaattcgttagaatatatgccacgtttatacatggaatataaaataactacagtttgaaaaataacagtatcatttaaacatttaacttgcggggttaatctcacaactttactgtttttgaactgttcaaaatatagcatcgatccgtgagaaatacgtttagccgcctttaatagaggaaatcccaccgcctttctggatctcaccaacgacgatagttctgaccagcaactcatttcttcatcatccacctgttttaacatataataggcaggagatagatatccgtcattgcaatattccttctcgtaggcacacaatctaatattgataaaatctccattctcttctctgcatttattatcttgtctcggtggctgattaggctgtggtcttggtttaggccttggtctatcgttgttgaatctattttggtcattaaatctttcatttcttcctggtatatttctatcacctcgtttggttggatttttgtctatattatcgtttgtaacatcggtacgggtattcatttatcacaaaaaaaacttctctaaatgagtctactgctagaaaacctcatcgaagaagataccatattttttgcaggaagtatatctgagtatgatgatttacaaatggttattgccggcgcaaaatccaaatttccaagatctatgctttctatttttaatatagtacctagaacgatgtcaaaatatgagttggagttgattcataacgaaaatatcacaggagcaatgtttaccacaatgtataatataagaaacaatttgggtctaggagatgataaactaactattgaagccattgaaaactatttcttggatcctaacaatgaagttatgcctcttattattaataatacggatatgactgccgtcattcctaaaaaaagtggtaggagaaagaataagaacatggttatcttccgtcaaggatcatcacctatcttgtgcattttcgaaactcgtaaaaagattaatatttataaagaaaatatggaatccgcgtcgactgagtatacacctatcggagacaacaaggctttgatatctaaatatgcgggaattaatgtcctgaatgtgtattctccttccacatccataagattgaatgccatttacggattcaccaataaaaataaactagagaaacttagtactaataaggaactagaatcgtatagttctagccctcttcaagaacccattaggttaaatgattttctgggactattggaatgtgttaaaaagaatattcctctaacagatattccgacaaaggattgattactataaatggagaatgttcctaatgtatactttaatcctgtgtttatagagcccacgtttaaacattctttattaagtgtttataaacacagattaatagttttatttgaagtattcgttgtattcattctaatatatgtattttttagatctgaattaaatatgttcttcatgcctaaacgaaaaatacccgatcctattgatagattacgacgtgctaatctagcgtgtgaagacgataaattaatgatctatggattaccatggatgacaactcaaacatctgcgttatcaataaatagtaaaccgatagtgtataaagattgtgcaaagcttttgcgatcaataaatggatcacaaccagtatctcttaacgatgttcttcgcagatgatgattcattttttaagtatttggctagtcaagatgatgaatcttcattatctgatatattgcaaatcactcaatatctagactttctgttattattattgatccaatcaaaaaataaattagaagctgtgggtcattgttatgaatctctttcagaggaatacagacaattgacaaaattcacagactttcaagattttaaaaaactgtttaacaaggtccctattgttacagatggaagggtcaaacttaataaaggatatttgttcgactttgtgattagtttgatgcgattcaaaaaagaatcctctctagctaccaccgcaatagatcctgttagatacatagatcctcgtcgtgatatcgcattttctaacgtgatggatatattaaagtcgaataaagtgaacaataattaattctttattgtcatcatgaacggcggacatattcagttgataatcggccccatgttttcaggtaaaagtacagaattaattagacgagttagacgttatcaaatagctcaatataaatgcgtgactataaaatattctaacgataatagatacggaacgggactatggacgcatgataagaataattttgaagcattggaagcaactaaactatgtgatgtcttggaatcaattacagatttctccgtgataggtatcgatgaaggacagttctttccagacattgtttaattctgtgagcgtatggcaaacgaaggaaaaatagttatagtagccgcactcgatgggacatttcaacgtaaaccgtttaataatattttgaatcttattccattatctgaaatggtggtaaaactaactgctgtgtgtatgaaatgctttaaggaggcttccttttctaaacgattgggtgaggaaaccgagatagagataataggaggtaatgatatgtatcaatcggtgtgtagaaagtgttacgtcggctcataatattatattttttatctaaaaaactaaaaataaacattgattaaattttaatataatacttaaaaatggatgttgtgtcgttagataaaccgtttatgtattttgaggaaattgataatgagttagattacgaaccagaaagtgcaaatgaggtcgcaaaaaaactgccgtatcaaggacagttaaaactattactaggagaattattttttcttagtaagttacagcgacacggtatattagatggtgccaccgtagtgtatataggatcggctcctggtacacatatacgttatttgagagatcatttctataatttaggagtgatcatcaaatggatgctaattgacggccgccatcatgatcctattttaaatggattgcgtgatgtaactctagtgactcggttcgttgatgaggaatatctacgatccatcaaaaaacaactgcatccttctaagattattttaatttctgatgtaagatccaaacgaggaggaaatgaacctagtacggcggatttactaagtaattacgctctacaaaatgtcatgattagtattttaaaccccgtggcgtctagtcttaaatggagatgcccgtttccagatcaatggatcaaggacttttatatcccacacggtaataaaatgttacaaccttttgctccttcatattcagctgaaatgagattattaagtatttataccggtgagaacatgagactgactcgagttaccaaattagacgctgtaaattatgaaaaaaagatgtactaccttaataagatcgtccgtaacaaagtagttgttaactttgattatcctaatcaggaatatgactattttcacatgtactttatgctgaggaccgtgtactgcaataaaacatttcctactactaaagcaaaggtactatttctacaacaatctatatttcgtttcttaaatattccaacaacatcaactgaaaaagttagtcatgaaccaatacaacgtaaaatatctagcaaaaattctatgtctaaaaacagaaatagcaagagatccgtacgcggtaataaatagaaacgtactactgagatatactaccgatatagagtataatgatttagttactttaataaccgttagacataaaattgattctatgaaaactgtgtttcaggtatttaacgaatcatccataaattatactccggttgatgatgattatggagaaccaatcattataacatcgtatcttcaaaaaggtcataacaagtttcctgtaaattttctatacatagatgtggtaatatctgacttatttcctagctttgttagactagatactacagaaactaatatagttaatagtgtactacaaacaggcgatggtaaaaagactcttcgtcttcccaaaatgttagagacggaaatagttgtcaagattctctatcgccctaatataccattaaaaattgttagatttttccgcaataacatggtaactggagtagagatagccgatagatctgttatttcagtcgctgattaatcaattagtagagatgagataagaacattataataatcaataatatatcttatatcttatatcttatatcttatatcttgtttagaaaaatgctaatattaaaatagctaacgctagtaatccaatcggaagccatttgatatctataatagggtatctaatttcctgatttaaatagcggacagctatattctcggtagctactcgtttggaatcacaaacattatttacatctaatttactatctgtaatggaaacgtttcccaatgaaatggtacaatccgatacattgcattttgttatatttttttttaaagaggctggtaacaacgcatcgcttcgtttacatggctcgtaccaacaataatagggtaatcttgtatctattcctatccgtactatgcttttatcaggataaatacatttacatcgtatatcgtctttgttagcatcacagaatgcataaatttgttcgtccgtcatgataaaaatttaaagtgtaaatataactattatttttatagttgtaataaaaagggaaatttgattgtatactttcggttctttaaaagaaactgacttgataaaaatggctgtaatctctaaggttacgtatagtctatatgatcaaaaagagattaatgctacagatattatcattagtcatgttaaaaatgacgacgatatcggtaccgttaaagatggtagactaggtgctatggatggggcattatgtaagacttgtgggaaaacggaattggaatgtttcggtcactggggtaaagtaagtatttataaaactcatatagttaagcctgaatttatttcagaaattattcgtttactgaatcatatatgtattcactgcggattattgcgttcacgagaaccgtattccgacgatattaacctaaaagagttatcgggacacgctcttaggagattaaaggataaaatattatccaagaaaaagtcatgttggaacagtgaatgtatgcaaccgtatcaaaaaattactttttcaaagaaaaaggtttgtttcgtcaacaagttggatgatattaacgttcctaattctctcatctatcaaaagttaatttctattcatgaaaagttttggccattattagaaattcatcaatatccagctaacttattttatacagactactttcccatccctccgttgattattagaccggctattagtttttggatagatagtatacccaaagagaccaatgaattaacttacttattaggtatgatcgttaagaattgtaacttgaatgctgatgaacaggttatccagaaggcggtaatagaatacgatgatattaaaattatttctaataacactaccagtatcaatttatcatatattacatccggcaaaaataatatgattagaagttatatcgtcgcccgacgaaaagatcagaccgctagatctgtaattggtcccagtacatctatcaccgttaatgaggtaggaatgcccgcatatattagaaatacacttacagaaaagatatttgttaatgcctttacagtggataaagttaaacaactattagcgtcaaaccaagttaaattttactttaataaacgattaaaccaattaacaagaatacgccaaggaaagtttattaaaaataaaatacatttattgcctggtgattgggtagaagtagctgttcaagaatatacaagtattatttttggaagacagccgtctctacatagatacaacgtcatcgcttcatctatcagagctaccgaaggagatactatcaaaatatctcccggaattgccaactctcaaaatgctgatttcgacggggatgaggaatggatgatattagaacaaaatcctaaagctgtaattgaacaaagtattcttatgtatccgacgacgttactcaaacacgatattcatggagcccccgtttatggatctattcaagatgaaatcgtagcagcgtattcattgtttaggatacaagatctttgtttagatgaagtattgaacatcttggggaaatatggaagagagttcgatcctaaaggtaaatgtaaattcagcggtaaagatatctatacttacttgataggtgaaaagattaattatccgggtctcttaaaggatggtgaaattattgcaaacgacgtagatagtaattttgttgtggctatgaggcatctgtcattggctggactcttatccgatcataagtcgaacgtggaaggtatcaactttattatcaagtcatcttatgtttttaagagatatctatctatttacggttttggggtgacattcaaagatctgagaccaaattcgacgttcactaataaattggaggccatcaacgtagaaaaaatagaacttatcaaagaagcatacgccaaatatctcaacgatgtaagagacgggaaaatagttccattatctaaagctttagaggcggactatgtggaatccatgttatccaacttgacaaatcttaatatccgagagatagaagaacatatgagacaaacgctgatagatgatccagataataacctcctgaaaatggccaaagcgggttataaagtaaatcccacagaactaatgtatattctaggtacgtatggacaacaaaggattgatggtgaaccagcagagactcgagtattgggtagagttttaccttactatcttccagactctaaggatccagaaggaagaggttacattcttaattctttaacaaaaggattaacgggttctcaatattacttttcgatgctggttgccagatctcaatctactgatatcgtctgtgaaacatcacgtaccggaacactggctagaaaaatcattaaaaagatggaggatatggtggtcgacggatacggacaagtagttataggtaatacgctcatcaagtacgccgccaattataccaaaattctaggctcagtatgtaaacctgtagatcttatctatccagatgagtccatgacttggtatttggaaattagtgctctgtggaataaaataaaacagggattcgtttactctcagaaacagaaacttgcaaagaagacattggcgccgtttaatttcctagtattcgtcaaacccaccactgaggataatgctattaaggttaaggatctgtacgatatgattcataacgtcattgatgatgtgagagagaaatacttctttacggtatctaatatagattttatggagtatatattcttgacgcatcttaatccttctagaattagaattacaaaagaaacggctatcactatctttgaaaagttctatgaaaaactcaattatactctaggtggtggaactcctattggaattatttctgcacaggtattgtctgagaagtttacacaacaagccctgtccagttttcacactactgaaaaaagtggtgccgtcaaacaaaaacttggtttcaacgagtttaataacttgactaatttgagtaagaataagaccgaaattatcactctggtatccgatgatatctctaaacttcaatctgttaagattaatttcgaatttgtatgtttgggagaattaaatccaaacatcactcttcgaaaagaaacagataaatatgtagtagatataatagtcaatagattatacatcaagagagcagaaataaccgaattagtcgtcgaatatatgattgaacgatttatctcctttagcgtcattgtaaaggaatggggtatggagacattcattgaggacgaggataatattagatttactgtctacctaaatttcgttgaaccggaagaattgaatcttagtaagtttatgatggttcttccgggggcagccaacaagggaaagattagtaaattcaagattcctatctctgattatacgggatatgacgacttcaatcaaacaaaaaagctcaataagatgactgtagaactcatgaatctaaaagaattgggttctttcgatttggaaaacgtcaacgtgtatcctggagtatggaatacatacgatatcttcggtatcgaggccgctcgtgaatacttgtgcgaagccatgttaaacacctatggagaagggttcgattatctgtatcagccttgtgatcttctcgctagtttactatgtgctagttacgaaccagaatcagtgaataaattcaagttcggcgcagctagtactcttaagagagctacgttcggagacaataaagcattgttaaacgcggctcttcataaaaagtcagaacctattaacgataatagtagctgccacttttttagcaaggtccctaatataggaactggatattacaaatactttatcgacttgggtcttctcatgagaatggaaaggaaactatctgataagatatcttctcaaaagatcaaggaaatggaagaaacagaagacttttaattcttatcaataacatatttttctatgatctgtcttttaaacgatggattttccacaaatgcgcctctcaagtccctcatagaatgatacacgtataaaaaatatagcataggcaatgactccttatttttagacattagatatgccaaaatcatagccccgcttctatttactcccgcagcacaatgaaccaacacgggctcgtttcgttgatcacatttagataaaaaggcggttacgtcgtcaaaatatttactaatatcggtagttgtatcatctaccaacggtatatgaataatattaatattagagttaggtaatgtatatttatccatcgtcaaatttaaaacatatttgaacttaacttcagatgatggtgcatccatagcatttttataatttcccaaatacacattattggttacccttgtcattatagtgggagatttggctttgtgcatatctccagttgaacgtagtagtaagtatttatacaaacttttcttatccatttataacgtacaaatggataaaactactttatcggtaaacgcgtgtaatttagaatacgttagagaaaaggctatagtaggcgtacaagcagccaaaacatcaacacttatattctttgttattatattggcaattagtgcgctattactctggtttcagacgtctgataatccagtctttaatgaattaacgagatatatgcgaattaaaaatacggttaacgattggaaatcattaacggatagcaaaacaaaattagaaagtgatagaggtagacttctagccgctggtaaggatgatatatttgaattcaaatgtgtggatttcggcgcctattttatagctatgcgattggataagaaaacatatctgccgcaagctattaggcgaggtactggagacgcgtggatggttaaaaaggcggcaaaggtcgatccatctgctcaacaattttgtcagtatttgataaaacacaagtctaataatgttattacttgtggtaatgagatgttaaatgaattaggttatagcggttattttatgtcaccgcattggtgttccgattttagtaatatggaatagtgttagataaatgcggtaacgaatgttcctgtaaggaaccataacagcttagatttaacgttaaagatgagcataaacataataaacaaaattacaatcaaacttataacattaatatcaaacaatccaaaaaatgaaatcagtggagtagtaaacgcgtacataactcctggataacgtttagcagctgccgttcctattctagaccaaaaattcggtttcatgttttcgaaacggtattctgcaacaagtcgaggatcgtgttctacatatttggcggcattatccagtatctgcctattgatcttcatttcgttttcgattctggctatttcaaaataaaatcccgatgatagacctccagactttataatttcatctacgatgttcagcgccgtagtaactctaataatataggctgataagctaacatcataccctcctgtatatgtgaatatggcatgatttttgtccattacaagctcggttttaactttattgcctgtaataatttctctcatctgtaggatatctatttttttgtcatgcattgccttcaagacgggacgaagaaacgtaatatcctcaataacgttatcgttttctacaataactacatattctacctttttattttctaactcggtaaaaaaattagaatcccatagggctaaatgtctagcgatatttcttttcgtttcctctgtacacatagtgttacaaaaccctgaaaagaagtgagtatacttgtcatcatttctaatgtttcctccagtccactgtataaacgcataatccttgtaatgatctggatcatccttgactaccacaacatttcttttttctggcataacttcgttgtcctttacatcatcgaacttctgatcattaatatgctcatgaacattaggaaatgtttctgatggaggtctatcaataactggcacaacaataacaggagttttcaccgccgccatttagttattgaaattaatcatatacaactctttaatacgagttatattttcgtctatccattgtttcacattgacatatttcgacaaaaagatataaaatgcgtattccaatgcttctctgtttaatgaattactaaaatatacaaacacgtcactgtctggcaataaatgatatcttagaatattgtaacaatttattttgtattgcacatgttcgtgatctatgagttcttcttcgaatggcataggatctccgaatctgaaaacgtataaataggagttagaataataatatttgagagtattggtaatatataaactctttagcggtataattagtttttttctctcaatttctatttttagatgtgatggaaaaatgactaattttgtagcattagtatcatgaactctaatcaaaatcttaatatcttcgtcacacgttagctctttgaagtttttaagagatgcatcagttggttctacagatggagtaggtgcaacaattttttgttctacacatgtatgtactggagccattgttttaactataatggtgcttgtatcgaaaaactttaatgcagatagcggaagctcttcgccgcgactttctacgtcgtaattgggttctaacgccgatctctgaatggatactagttttctaagttctaatgtgattctctgaaaatgtaaatccaattcctccggcattatagatgtgtatacatcggtaaataaaactatagtatccaacgatcccttctcgcaaattctagtcttaaccaaaaaatcgtatataaccacggagatggcgtatttaagagtggattcttctaccgttttgttcttggatgtcatataggaaactataaagtccgcactactgttaagaatgattactaacgcaactatatagtttaaattaagcattttggaaacataaaataactctgtagacgatacttgactttcgaataagtttgcagacaaacgaagaaagaacagacctctcttaatttcagaagaaaactttttttcgtattcctgacgtctagagtttatatcaataagaaagttaagaattagtcggttaatgttgtatttcattacccaagtttgagatttcataatattatcaaaagacatgataatattaaagataaagcgctgactatgaacgaaatagctatatggttcgctcaagaatatagtcttgttaaacgtggaaacgataactgtatttttaatcacgtcagcggcatctaaattaaatataggtatatttattccacacactctacaatatgccacaccatcttcataataaataaattcgttagcaaaattattaattttagtgaaatagttagcgtcaactttcatagcttccttcaatctaatttgatgctcacacggtgcgaattccactctaacatcccttttccatgcctcaggttcatcgatctctataatatctagttttttgcgtttcacaaacacaggctcgtctctcgcgatgagatctgtatagtaactatgtaaatgataactagatagaaagatgtagctatatagatgacgatcctttaagagaggtataataactttaccccaatcagatagactgttgttatggtcttcggaaaaagaatttttataaatttttccagtattttccaaatatacgtacttaacatctaaaaaatccttaatgataataggaatggataatccgtctattttataaagaaatacatatcgcacattatacttttttttggaaatgggaataccgatgtgtctacataaatatgcaaagtctaaatattttttagagaatcttagttggtccaaattcttttccaagtacggtaatagatttttcatattgaacggtatcttcttaatctctggttctagttccgcattaaatgatgaaactaagtcactatttttataactaacgattacatcacctctaacatcatcatttaccagaatactgatcttcttttgtcgtaaatacatgtctaatgtgttaaaaaaaagatcatacaagttatacgtcatttcatctgtggtattcttgtcattgaaggataaactcgtactaatctcttctttaacagcctgttcaaatttatatcctatatacgaaaaaatagcaaccagtgtttgatcatccgcgtcaatattctgttctatcgtagtgtataacaatcgtatatcttcttctgtgatagtcgatacgttataaaggttgataacgaaaatatttttatttcgtgaaataaagtcatcgtaggattttggacttatattcgcgtctagtagatatgcttttatttttggaatgatctcaattagaatagtctctttagagtccatttaaagttacaaacaactaggaaattggtttatgatgtataatttttttagtttttatagattctttattctatacttaaaaaatgaaaataaatacaaaggttcttgagggttgtgttaaattgaaagcgagaaataatcataaattatttcattatcgcgatatccgttaagtttgtatcgtaatggcgtggtcaattacgaataaagcggatactagtagcttcacaaagatggctgaaatcagagctcatctaaaaaatagcgctgaaaataaagataaaaacgaggatattttcccggaagatgtaataattccatctactaagcccaaaaccaaacgagccactactcctcgtaaaccagcggctactaaaagatcaaccaaaaaggaggaagtggaagaagaagtagttatagaggaatatcatcaaacaactgaaaaaaattctccatctcctggagtcagcgacattgtagaaagcgtggccgctgtagagctcgatgatagcgacggggatgatgaacctatggtacaagttgaagctggtaaagtaaatcatagtgctagaagcgatctctctgacctaaaggtggctaccgacaatatcgttaaagatcttaagaaaattattactagaatctctgcagtatcgacggttctagaggatgttcaagcagctggtatctctagacaatttacttctatgactaaagctattacaacactatctgatctagtcaccgagggaaaatctaaagttgttcgtaaaaaagttaaaacttgtaagaagtaaatgcgtgcacttttttataaagatggtaaactctttaccgataataattttttaaatcctgtatcagacgataatccagcgtatgaggttttgcaacatgttaaaattcctactcatttaacagatgtagtagtatatgaacaaacgtgggaggaggcgttaactagattaatttttgtgggaagtgattcaaaaggacgtagacaatacttttacggaaaaatgcatgtacagaatcgcaacgctaaaagagatcgtatttttgttagagtatataacgttatgaaacgaattaattgttttataaacaaaaatataaagaaatcgtccacagattccaattatcagttggcggtttttatgttaatggaaactatgttttttattagatttggtaaaatgaaatatcttaaggagaatgaaacagtagggttattaacactaaaaaataaacacatagaaataagtcccgatgaaatagttatcaagtttgtaggaaaggacaaagtttcacatgaatttgttgttcataagtctaatagactatataaaccgctattgaaactgacggatgattctagtcccgaagaatttctgttcaacaaactaagtgaacgaaaggtatacgaatgtatcaaacagtttggtattagaatcaaggatctccgaacgtatggagtcaattatacgtttttatataatttttggacaaatgtaaagtccatatctcctcttccgtcaccaaaaaagttaatagcattaactatcaaacaaactgctgaagtggtaggtcatactccatcaatttcaaaaagagcttatatggcaacgactattttagaaatggtaaaggataaaaattttttagatgtagtatctaaaactacgttcgatgaattcctatctatagtcgtagatcacgttaaatcatctacggatggatgatatagatctttacacaaataattacaagaccgataaatggaaatggataagcgtatgaaatctctcgcaatgacagctttcttcggagagctaagcacattagatattatggcattgataatgtctatatttaaacgccatccaaacaataccattttttcagtggataaggatggtcagtttatgattgatttcgaatacgataattataaggcttctcaatatttggatctgaccctcactccgatatctggagatgaatgcaagactcacgcatcgagtatagccgaacaattggcgtgtgcggatattattaaagaggatattagcgaatatatcaaaactactccccgtcttaaacgatttataaaaaaataccgcaatagatcagatactcgtatcagtcgagatacagaaaagcttaaaatagctctagctaaaggcatagattacgaatatataaaagacgcttgttaataagtaaatgaaaaaaaactagtcgtttataataaaacacgatatggatgccaacgtagtatcattttctactattgcgacgtatatagacgctttagcgaagaatgcttcggaattagaacagaggtctaccgcatacgaaataaataatgaattggaactagtatttattaagccgccattgattactttgacaaatgtagtgaatatctctacgattcaggaatcgtttattcgatttaccgttactaataaggaaggtgttaaaattagaactaagattccattatctaaggtacatggtctagatgtaaaaaatgtacagttagtagatgctatagataacatagtttgggaaaagaaatcattagtgacggaaaatcgtcttcacaaagaatgcttgttgagactatcgacagaggaacgtcatatatttttggattacaagaaatatggatcctctatccgactagaattagtcaatcttattcaagcaaaaacaaaaaactttacgatagactttaagctaaaatattttctaggatccggtgcccagtctaaaagttctttgttgcacgctattaatcatccaaagtcaaggcctaatacatctctggaaatagaattcacacctagagacaatgaaacagttccatatgatgaactaataaaggaattgacgactctctcgcgtcatatatttatggcttctccagagaatgtaattctttctccgcctattaacgcgcctataaaaacctttatgttgcctaaacaagatatagtaggtttggatctggaaaatctatatgccgtaactaagactgacggcattcctataactatcagagttacatcaaacgggttgtattgttattttacacatcttggttatattattagatatcctgttaagagaataatagattccgaagtagtagtctttggtgaggcagttaaggataagaactggaccgtatatctcattaagctaatagagcctgtgaatgcaatcaatgatagactagaagaaagtaagtatgttgaatctaaactagtggatatttgtgatcggatagtattcaagtcaaagaaatacgaaggtccgtttactacaactagtgaagtcgtcgatatgttatctacatatttaccaaagcaaccagaaggtgttattctgttctattcaaagggacctaaatctaacattgattttaaaattaaaaaggaaaatactatagaccaaactgcaaatgtagtatttaggtacatgtccagtgaaccaattatctttggagaatcgtctatctttgtagagtataagaaatttagcaacgataaaggctttcctaaagaatatggttctggtaagattgtgttatataacggcgttaattatctaaataatatctattgtttggaatatattaatacacataatgaagtgggtattaagtccgtggttgtacctattaagtttatagcagaattcttagttaatggagaaatacttaaacctagaattgataaaaccatgaaatatattaactcagaagattattatggaaatcaacataatatcatagtcgaacatttaagagatcaaagcatcaaaataggagatatctttaacgaggataaactatcggatgtgggacatcaatacgccaataatgataaatttagattaaatccagaagttagttattttacgaataaacgaactagaggaccgttgggaattttatcaaactacgtcaagactcttcttatttctatgtattgttccaaaacatttttagacgattccaacaaacgaaaggtattggcgattgattttggaaacggtgctgacctggaaaaatacttttatggagagattgcgttattggtagcgacggatccggatgctgatgctatagctagaggaaatgaaagatacaacaaattaaactctggaattaaaaccaagtactacaaatttgactacattcaggaaactattcgatccgatacatttgtctctagtgtcagagaagtattctattttggaaagtttaatatcatcgactggcagtttgctatccattattcttttcatccgagacattatgctaccgtcatgaataacttatccgaactaactgcttctggaggcaaggtattaatcactaccatggacggagacaaattatcaaaattaacagataaaaagacttttataattcataagaatttacctagtagcgaaaactatatgtctgtagaaaaaatagctgatgatagaatagtggtatataatccatcaacaatgtctactccaatgactgaatacattatcaaaaagaacgatatagtcagagtgtttaacgaatacggatttgttcttgtagataacgttgatttcgctacaattatagaacgaagtaaaaagtttattaatggcgcatctacaatggaagatagaccgtctacaaaaaactttttcgaactaaatagaggagccattaaatgtgaaggtttagatgtcgaagacttacttagttactatgttgtttatgtcttttctaagcggtaaataataatatggtatgggttctgatctcccagttctaaatgcattaaataattccaatagagcgatttttgttcctataggaccttccaactgtggatactctgtattgttaatagatatattaatacttttgtcgggtaacagaggttctacgtcttctaaaaataaaagttttataacatctggcctgttcataaataaaaacttggcgattctatatatactcttattatcaaatctagccattgtcttatagatgtgagctactgtaggtgtaccatttgattttctttctaatactatatatttctctcgaagaagttcttgcacatcatctgggaataaaatactactgttgagtaaatcagttattttttttatatcgatattgatggacatttttatagttaaggataataagtatcccaaagtcgataacgacgataacgaagtatttatacttttaggaaatcacaatgactttatcagattaaaattaacaaaattaaaggagcatgtatttttttctgaatatattgtgactccagatacatatggatctttatgcgtcgaattaaatgggtctagttttcagcacggcggtagatatatagaggtggaggaatttatagatgctggaagacaagttagatggtgttctacatccaatcatatatctaaagatatacccgaagatatgcacactgataaatttgtcatttatgatatttatacgtttgattcgttcaagaataaacgattggtattcgtacaggtacctccgtcgttaggagatgatagtcatttgactaatccgttattgtcaccgtattatcgtaattcagtagccagacaaatggtcaatgatatgatttttaatcaagattcatttttaaaatatttattagaacatctgattagaagccactatagagtttctaaacatataacaatagttagatacaaggataccgaagaattaaatctaacgagaatatgttataatagagataagtttaaggcgtttgtattcgcttggtttaacggcgtttcggaaaatgaaaaggtactagatacgtataaaaaggtatctaatttgatataatgaattcagtgactgtatcacacgcgccatatactattacttatcacgatgattgggaaccagtaatgagtcaattggtagagttttataacgaagtagccagttggctgctacgagacgagacgtcgcctattcctgataagttctttatacagttgaaacaaccgcttagaaataaacgagtatgtgtgtgtggtatagatccgtatccgaaagatggaactggtgtaccgttcgaatcaccaaattttacaaaaaaatcaattaaggagatagcttcatctatatctagattaaccggagtaattgattataaaggttataaccttaatataatagacggggttataccctggaattattacttaagttgtaaattaggagaaacaaaaagtcacgcgatttactgggataagatttccaagttactgctgcagcatataactaaacacgttagtgttctttattgtttgggtaaaacagatttctcgaatatacgggccaagttagaatccccggtaactaccatagtcggatatcatccagcggctagagaccgccaattcgagaaagatagatcatttgaaattatcaacgttttactggaattagacaacaaggcacctataaattgggctcaagggtttatttattaatgctttagtgaaattttaacttgtgttctaaatggatgcggctattagaggtaatgatgttatctttgttcttaagactataggtgtcccgtcagcgtgcagacaaaatgaagatccaagatttgtagaagcatttaaatgcgacgagttagaaagatatattgagaataatccagaatgtacactattcgaaagtcttagggatgaggaagcatactctatagtcagaattttcatggatgtagatttagacgcgtgtctagacgaaatagattatttaacggccattcaagattttattatcgaggtgtcaaactgtgtagctagattcgcgtttacagaatgcggcgccattcatgaaaatgtaataaaatccatgagatctaatttttcattgactaagtctacaaatagagataaaacaagttttcatattatctttttagatacgtataccactatggatacattgatagctatgaaacgaacactattagaattaagtagatcatctgaaaatccactaaccagatcgatagacactgccgtatataggagaaaaacaactcttcgggttgtaggtactaggaaaaatccaaattgcgacactattcatgtaatgcaaccaccgcatgataatatagaagattacctattcacttacgtggatatgaacaacaatagttattacttttctctacaacaacgattggaggatttagttcctgataagttatgggaaccagggtttatttcattcgaagacgctataaaaagagtttcaaaaatattcattaattctataataaactttaatgatctcgatgaaaataattttacaacggtaccactggtcatagattacgtaacaccttgtgcattatgtaaaaaacgatcgcataaacatccgcatcaactatcgttggaaaatggtgctattagaatttacaaaactggtaatccacatagttgtaaagttaaaattgttccgttggatggtaataaactgtttaatattgcacaaagaattttagacactaactctgttttattaaccgaacgaggagaccatatagtttggattaataattcatggaaatttaacagcgaagaacccttgataacaaaactaattttgtcaataagacatcaactacctaaggaatattcaagcgaattactctgtccaagaaaacgaaagactgtagaagctaacatacgagacatgttagtagattcagtggagaccgatacctatccggataaacttccgtttaaaaatggtgtattggacctggtagacggaatgttttactctggagatgatgctaaaaaatatacgtgtactgtatcaaccggatttaaatttgacgatacaaagttcgtcgaagacagtccagaaatggaagagttaatgaatatcattaacgatatccaaccattaacggatgaaaataagaaaaatagagagctatatgaaaaaacattatctagttgtttatgcggtgctaccaaaggatgtttaacattcttttttggagaaactgcaactggaaagtcgacaaccaaacgtttgttaaagtctgctatcggtgacctgtttgttgagacgggtcaaacaattttaacagatgtattggataaaggacctaatccatttatcgctaacatgcatttgaaaagatctgtattctgtagcgaactacctgattttgcctgtagtggatcaaagaaaattagatctgacaatattaaaaagttgacagaaccttgtgtcattggaagaccgtgtttctccaataaaattaataatagaaaccatgcgacaatcattatcgatactaattacaaacctgtttttgataggatagataacgcattaatgagaagaattgccgtcgtgcgattcagaacacacttttctcaaccttctggtagagaggctgctgaaaataatgacgcgtacgataaagtcaaactattagacgaggggttagatggtaaaatacaaaataatatatatagatttgcatttctatacttgttggtgaaatggtacaaaaaatatcatgttcctattatgaaactatatcctacacccgaagagattcctgactttgcattctatctcaaaataggtactctgttggtatctagctctgtaaagcatattccattaatgacggacctctccaaaaagggatatatattgtacgataatgtggtcactcttccgttgactactttccaacagaaaatatccaagtattttaattctagactatttggacacgatatagagagcttcatcaatagacataagaaatttgccaatgttagtgatgaatatctgcaatatatattcatagaggatatttcatctccgtaaatatatgctcatatatttatagaagatatcacatatctaaatgaataccggaatcatagatttatttgataatcatgttgatagtataccaactatattacctcatcagttagctactctagattatctagttagaactatcatagatgagaacagaagcgtgttattgttccatattatgggatcaggtaaaacaataatcgctttgttgttcgccttggtagcttccagatttaaaaaggtttacattctagtgccgaacatcaacatcttaaaaattttcaattataatatgggtgtagctatgaacttgtttaatgacgaattcatagctgagaatatctttattcattccacaacaagtttttattctcttaattataacgataacgtcattaattataacggattatctcgctacaataactctatttttatcgttgatgaggcacataatatctttgggaataatactggagaacttatgaccgtgataaaaaataaaaacaagattccttttttactattgtctggatctcccattactaacacacctaatactctgggtcatattatagatttaatgtccgaagagacgatagattttggtgaaattattagtcgtggtaagaaagtaattcagacacttcttaacgaacgcggtgtgaatgtacttaaggatttgcttaaaggaagaatatcatattacgaaatgcctgataaagatctaccaacgataagatatcacggacgtaagtttctagatactagagtagtatattgtcacatgtctaaacttcaagagagagattatatgattactagacgacagctatgttatcatgaaatgtttgataaaaatatgtataacgtgtcaatggcagtattgggacaacttaatctgatgaataatttagatactttatttcaggaacaggataaggaattgtacccaaatctgaaaataaataatggcgtgttatacggagaagaattggtaacgttaaacattagttccaaatttaaatactttattaatcggatacagacactcaacggaaaacattttatatacttttctaattctacatatggcggattggtaattaaatatatcatgctcagtaatggatattctgaatataatggttctcagggaactaatccacatatgataaacggcaaaccaaaaacatttgctatcgttactagtaaaatgaaatcgtctttagaggatctattagatgtgtataattctcctgaaaacgatgatggtagtcaattgatgtttttgttttcatcaaacattatgtccgaatcctatactctaaaagaggtaaggcatatttggtttatgactatcccagatactttttctcaatacaaccaaattcttggacgatctattagaaaattctcttacgccgatatttctgaaccagttaatgtatatcttttagccgccgtatattccgatttcaatgacgaagtgacgtcattaaacgattacacacaggatgaattaattaatgttttaccatttgacatcaaaaagctgttgtatctaaaatttaagacgaaagaaacgaatagaatatactctattcttcaagagatgtctgaaacgtattctcttccaccacatccatcaattgtaaaagttttattgggagaattggtcagacaatttttttataataattctcgtattaagtataacgataccaagttacttaaaatggttacatcagttataaaaaataaagaagacgctaggaattacatagatgatattgtaaacggtcacttctttgtatcgaataaagtatttgataaatctcttttatacaaatacgaaaacgatattattacagtaccgtttagactttcctacgaaccatttgtttggggagttaactttcgtaaagaatataacgtggtatcttctccataaaactgatgagatatataaagaaataaatgtcgagctttgttaccaatggatacctttccgttacattggaaccacacgagctgacgttagacataaaaactaatattaggaatgccgtatataagacgtatctccatagagaaattagtggtaaaatggccaagaaaatagaaattcgtgaagacgtggaattacctctcggcgaaatagttaataattctgtagttataaacgttccgtgtgtaataacctacgcgtattatcacgttggggatatagtcagaggaacattaaacatcgaagatgaatcaaatgtaactattcaatgtggagatttaatctgtaaactaagtagagattcgggtactgtatcatttagcgattcaaagtactgcttttttcgaaatggtaatgcgtatgacaatggcagcgaagtcactgccgttctaatggaggctcaacaaggtatcgaatctagttttgtttttctcgcgaatatcgtcgactcataaaaaagagaatagcggtaagtataaacacgaatactatggcaataattgcgaatgttttattctcttcgatatatttttgataatatgaaaaacatgtctctctcaaatcggacaaccatctcataaaatagttctcgcgcgctggagaggtagttgccgctcgtataatctctccagaataatatacttgcgtgtcgtcgttcaatttatacggatttctatagttctctgttatataatgcggtttgccctcatgattagacgacgacaatagtgttctaaatttagatagttgatcagaatgaatgtttattggcgttggaaaaattatccatacagcgtctgcagagtggttgatagttgttcctagatatgtaaaataatccaacttactaggcagcaaattgtctagataaaatactgaatcaaacggtgcagacgtattggcggatctaatggaatccaattgattaactatcttttgaaaatatacatttttatgatccaatacttgtaagaatatagaaataatgataagtccatcatcgtgtttttttgcctcttcataagaactatattttttcttattccaatgaacaagattaatctctccagagtatttgtacacatctatcaagtgattggatccataatcgtcttcctttccccaatatatatgtagtgatgataacacatattcattggggagaaaccctccacttatatatcctcctttaaaattaatccttactagttttccagtgttctggatagtggttggtttcgactcattataatgtatgtctaacggcttcaatcgcgcgttagaaattgcttttttagtttctatattaataggagatagttgttgcggcatagtaaaaatgaaatgataactgtttaaaaatagctcttagtatgggaattacaatggatgaggaagtgatatttgaaactcctagagaattaatatctattaaacgaataaaagatattccaagatcaaaagacacgcatgtgtttgctgcgtgtataacaagtgacggatatccgttaataggagctagaagaacttcattcgcgttccaggcgatattatctcaacaaaattcagattctatctttagagtatccactaaactattacggtttatgtactacaatgaactaagagaaatctttagacggttgagaaaaggttctatcaacaatatcgatcctcactttgaagagttaatattattgggtggtaaactagataaaaaggaatctattaaagattgtttaagaagagaattaaaagaggaaagtgatgaacgtataacagtaaaagaatttggaaatgtaattctaaaacttacaacacgggataaattatttaataaagtatatataagttattgcatggcgtgttttattaatcaatcgttggaggatttatcgcatactagtatttacaatgtagaaattagaaagattaaatcattaaatgattgtattaacgacgataaatacgaatatctgtcttatatttataatatgctagttaatagtaaatgaacttttacagatctagtataattagtcagattattaagtataatagacgactagctaagtctattatttgcgaggatgactctcaaattattacactcacggcattcgttaaccaatgcctatggtgtcataaacgagtatccgtgtccgctattttattaactactgataacaaaatattagtatgtaacagacgagatagttttctctattctgaaataattagaactagaaacatgtttagaaagaaacgattatttctgaattattccaattatttgaacaaacaggaaagaagtatactatcgtcatttttttctctagatccagctactactgataatgatagaatagacgctatttatccgggtggcatacccaaaaggggtgagaatgttccagagtgtttatccagggaaattaaagaagaagttaatatagacaattcttttgtattcatagacactcggttttttattcatggcatcatagaagataccattattaataaattttttgaggtaatcttctttgtcggaagaatatctctaacgagtgatcaaatcattgatacatttaaaagtaatcatgaaatcaaggatctaatatttttagatccgaattcaggtaatggactccaatacgaaattgcaaaatatgctctagatactgcaaaacttaaatgttacggccatagaggatgttattatgaatcattaaaaaaattaactgaggatgattgattaaaaaatataaattaatttaccatcgtgtatttttataacgggattgtccggcatatcatgtagatagttaccgtctacatcgtatactcgaccatctacgcctttaaatcctctatttattgacattaatctattagaattggaataccaaatattagtaccctcaattagtttattggtaatattttttttagacgatagatcgatggctcttgaaaccaaggttttccaaccggactcattgtcgatcggtgagaagtctttttcattagcatgaatccattctaatgatgtatgtttaaacactctaaacaattggacaaattcttttgatttgctttgaatgatttcaaataggtcttcgtctacagtaggcataccattagataatctagccattataaagtgcacgtttacatatctacgttctggaggagtaagaacgtgactattgagacgaatggctcttcctactatctgacgaagagacgcctcgttccatgtcatatctaaaatgaagatatcattaattgagaaaaaactaataccctcgcctccactagaagagaatacgcatgttttaatgcattctccgttagtgtttgattcttggttaaactcagccaccgccttgattctagtatcttttgttctagatgagaactctatattagagataccaaagactttgaaatatagtaataagatttctattcctgactgattaacaaatggttcaaagactagacatttaccatgggatgctaatattcccaaacatacatctataaatttgacgcttttctcttttaattcagtaaatagagagatatcagccgcactagcatcccctttcaatagttctccctttttaaaggtatctaatgcggatttagaaaactctctatctcttaatgaatttttaaaatcattatatagtgttgctatctcttgcgcgtattcgcccggatcacgattttgtctttcaggaaagctatcgaacgtaaacgtagtagccatacgtctcagaattctaaatgatgatatacctgtttttatttcagcgagtttagccttttgataaatttcttcttgctttttcgacatattaacgtatcgcattaatactgttttcttagcgaatgatgcagacccttctacgtcatcaaaaatagaaaactcgttattaactatatacgaacatagtcctcctagtttggagactaattctttttcatcgactagacgtttattctcaaatagcgattggtgttgtaaggatcctggtcgtagtaagttaaccaacatggtgaattcttgcacactattgacgataggtgtagccgataaacaaatcatcttatggttttttaacgcaatggtcttagataaaaaattatatactgaacgagtaggacggatcttaccatcttctttgattaatgatttagaaatgaagttatgacattcatcaataatgacgcatattctactcttggaattaatagttttgatattagtaaaaaatttatttctaaaattttgatcatcgtaattaataaaaatacaatccttcgttatctctggagcgtatctgagtatagtgttcatccaaggatcttctatcaaagcctttttcaccaataagataatagcccaattcgtataaatatccttaagatgtttgagaatatatacagtagtcattgttttaccgacacccgtttcatggaacaataaaagagaatgcatactgtctaatcctaagaaaactcttgctacaaaatgttgataatccttgaggcgtactacgtccgaccccatcatttcaacgggcatattagtagttctgcgtaaggcataatcgatataggccgcgtgtgatttactcatttatgagtgataagtaataactatgttttaaaaatcacagcagtagtttaactagtcttctctgatgtttgttttcgatactttttgaatcagaagtcatactagaataaagcaacgagtgaacgtaatagagagcttcgtatactctattcgaaaactctaagaacttattaatgaattccgtatccactggattgtttaaaatactaaattgaacactgttcacatccttccaagaagaagacttagtgacggacttaacatgagacataaataaatccaaattttttttacaaacatcactagccaccataatggcgctatctttcaaccagctatcgcttacgcattttagcagtctaacatttttaaagagactacaatatattctcatagtatcgattacacctctaccgaataaagttggaagtttaataatacaatatttttcgtttacaaaatcaaataatggtcgaaacacgtcgaaggttaacatcttataatcgctaatgtatagattgttttcagtgagatgattattagatttaatagcatctcgttcacgtttgaacagtttattgcgtgcgctgaggtcggcaactacggcgtccgctttagtactcctcccataatactttacgctattaatctttaaaatttcatagactttatctagatcgctttctggtaacatgatatcatgtgtaaaaagttttaacatgtcggtcggcattctatttagatcattaactctagaaatctgaagaaagtaattagctccgtattccagactaggtaatgggcttttacctagagacagattaagttctggcaatgtttcataaaatggaagaaggacatgcgttccctcccggatattttttacaatttcatccatttacaactctatagtttgttttcattattattagttattatctcccataatcttggtaatacttaccccttgatcgtaagataccttatacaggtcattacatacaactaccaattgtttttgtacataatagattggatggttgacatccatggtggaataaactactcgaacagatagtttatctttccccctagatacattagccgtaatagttgtcggcctaaagaatatctttggtgtaaagttaaaagttagggttcttgttccattattgctttttgtcagtagttcattataaattctcgagatgggtccgttctctgaatatagaacatcatttccaaatctaacttctagtctagaaataatatcggtcttattcttaaaatctattcccttgatgaagggatcgttaatgaacaaatccttggcctttgattcggctgatctattatctccgttatagacgttacgttgactagtccaaagacttacaggaatagatgtatcgatgatgttgatactatgtgatatgtgagcaaagattgttctcttagtggcatcactatatgttccagtaatggcggaaaactttttagaaatgttatatataaaagaattttttcgtgttccaaacattagcagattagtatgaagataaacactcatattatcaggaacattatcaatttttacatacacatcagcatcttgaatagaaacgataccatcttctggaacctctacgatctcggcagactccggataaccagtcggtgggccatcgctaacaataactagatcatccaacaatctactcacatatgcatctatataatctttttcatcttgtgagtaccctggatacgaaataaatttattatccgtatttccataataaggtttagtataaacagagagagatgttgccgcatgaacttcagttacagtcgccgttggttggtttatttgacctattactctcctaggtttctctataaacgatggtttaatttgtacattcttaaccatatatccaataaagctcaattcaggaacataaacaaattctttgttgaacgtttcaaagtcgaacgaagagtcacgaataacgatatcggatactggattgaaggttaccgttacggtaatttttgaatcggatagtttaagactgctgaatgtatcttccacatcaaacggagttttaatataaacgtatactgtagatggttctttaatagtgtcattaggagttaggccaatagaaatatcattaagttcactagaatatccagagtgtttcaaagcaattgtattattgatacaattattatataattcttcgccctcaatttcccaaataacaccgttacacgaagagatagatacgtgattaatacatttatatccaacatatggtacgtaactgaatcttcccatacctttaacttctggaagttccaaactcagaaccaaatgattaagcgcagtaatatactgatccctaatttcgaagctagcgatagcctgattgtctggaccatcgtttgtcataactccggatagagaaatatattgcggcatatacaaagttggaatttgactatcgactgcgaagacattagaccgtttaatagagtcatccccaccgatcaaagaattaatgatagtattattcattttctatttaaaatggaaaaagcttacaataaactccgtagagaaatatctataatttgtgagttttccttaaagtaacagcttccgtaaacgccgtctttatctcttagtaggtttattgtatttatgaccttttccttatcttcatagaatactaaaggcaacaaagaaatttttggttcttctctaagagctacgtgagacttaaccatagaagccaacgaatccctacatattttagaacagaaataccctacttcaccacccttgtatgtctcaatactaataggtctaaaaaccaaatcttgattacaaaaccaacacttatcaattacactatttgtcttaatagacacatctgccatagatttataatactttggtagtatacaagcgagtgcttcttctttagcgggcttaaagactgctttaggtgctgaaataaccacatctggaaggcttactcgcttagccatttaattacggaactatttttttatacttctaatgagcaagtagaaaacctctcatctacaaaaacgtactcgtgtccataatcctctaccatagttacacgttttttagatctcatatgtgctaaaaagttttcccatactaattggttactattatttttcgtataatttttaacagtttgaggttttagatttttagttacagaagtgatatcgaatattttatccaaaaagaatgaataattaattgtcttagaaggagtgttttcttggcaaaagaataccaagtgcttaaatatttctactacttcattaatcttttctgtactcagattcagtttctcatcttttacttgattgattatttcaaagactaacttataatcctttttatttattctctcgttagccttaagaaaactagatacaaaatttgcatctacatcatccgtggatatttgatttttttccatgatatccaagagttccgagataatttctccagaacattgatgagacaataatctccgcaatacatttctcaaatgaataagtttattagacacgtggaagtttgactttttttgtacctttgtacatttttgaaataccgactcgcaaaaaatacaatattcatatccttgttcagatactataccgttatgtctacaaccgctacataatcgtagattcatgttaacactctacgtatctcgtcgtccaatattttatataaaaacattttatttctagacgttgccagaaaatcctgtaatatttttagttttttgggctgtgaataaagtatcgccctaatattgttaccgtcttccgccaatatagtagttaaattatccgcacatgcagaagaacaccgcttaggcggattcagtacaatgttatatttttcgtaccaactcatttaaatatcataatctaaaatagttctgtaatatgtctagcgctaatatattgatcataatcctgtgcataaattaagatacaacaatgtctcgaaatcatcgacatggcttcttccatagttagaagatcgtcgtcaaagttagcaacgtgattcatcaacatttgctgttttgaggcagcaaatactgaaccgtcgccattcaaccattcataaaaaccatcgtctgaatccattgataatttcttgtactggtttttgagagctcgcatcaatctagcatttctagctcccggattgaaaacagaaagaggatcgtacatccagggtccattttctgtaaatagaatcgtataatgtcccttcaagaagatatcagacgatccacaatcaaagaattggtctccgagtttgtaacaaactgcggactttaacctatacatgataccgtttagcataatttctggtgatacgtcaatcggagtatcatctattagagatctaaagccggtgtaacattctccaccaaacatattcttattctgacgtcgttctacataaaacatcattgctccattaacgataacaggggaatgaacagcactacccatcacattagttcccaatggatcaatgtgtgtaactccagaacatcttccatagcctatgttaggaggagcgaacaccactcttccactattgccatcgaatgccatagaataaatatccttggaattgatagaaatcggactgtcggatgttgtgatcatcttcataggattaacaactatgtatggtgccgcctgaagtttcatatcgtaactgatgccgtttataggtctagccacagaaaccaacgtaggtctaaatccaactatagacaaaatagaagccaatatctgttcctcatctgtcataacttgagagcatccagtatgaataatcttcattagatggggatctaccgcatcatcatcgttacaataaaaaattcccattctaatgttcataattgcttttctaatcatggtatgcatgtttgctctctgaatctctgtggaaattagatctgatacacctgtaatcactatcggattatcctccgtaagacgattaaccaacaacatataattataagactttacttttctaaattcataaagttgctggattaggctataggtgtctccatgtacatacgcgttctcgagcgcaggaagtttaataccgaatagtgccatcagaataggatgaatatagtaattagtttctggttttctataaataaaagacaaatcttgtgaactagacatatcggtaaaatgcatggattggaatcgtgtagtcgacagaagaatatgatgattagatggagagtatattttatctaactctttgagttggtcaccgattctaggactagctcgagaatgaataagtactaaaggatgagtacatttcacagaaacactagcattgttcaatgtgctctttacatgggtaaggagttgaaatagctcgtttctatttgttctgacaatatttagtttattcataatgttaagcatatcctgaatagtaaagttagatgtgtcatacttgttagtagttagatatttagcaattgcattcccatcatttctcaatctcgtactccaatcatgcgtggatgctacttcgtcgatggaaaccatacaatcctttttgataggctgttgagattgatcatttcctgcacgtttaggtttggtacgttgatttctagcccctgcggatataaagtcatcgtctacaatttgggacaatgaattgcatacactacaagacaaagatttatcagaagtgtgaatatgatcttcatctaccaaagaaagagtttgattagtataactagattttagtcctgcgttagatgttaaaaaaacatcgctattgaccacggcttccattatttatattcgtagtttttactcgaaagcgtgattttaatatccaatcttattacttttggaatcgttcaaaacctttgactagttgtagaatttgatctattgccctacgcgtatactcccttgcatcatatacgttcgtcaccagatcgtttgtttcggcctgaagttggtgcatatctctttcaacattcgacatgagatccttaagggccatatcgtctagattttgttgagatgctgctcctggatttggattttgttgtgctgttgtacatactgtaccaccagtaggtgtaggagtacatacagtggccacaataggaggttgagaaagtgtaaccgttggagtagtacaagaaatacttccatccgattgttgtgtacatgtagttgttggtaacgtctgagaaggttgggtagatggcggcgtcgtcgttttttgatctttattaaatttagagataatatcctgaacagcattgctcggcgtcaacgctggaaggagtgaactcgccggcgcatcagtatcttcagacagccaatcaaaaagattagacatatcagatgatgtattagtttgttgtcgtggttttggtgtaggagcagtactactaggtagaagaataggagccgatgtagctgttggaaccggctgtggagttatatgaatagttggttgtagcggttggataggctgtctgctggcggccatcatattatctctagctagttgttctcgcaactgtctttgataatacgactcttgagactttagtcctatttcaatcgcttcatcctttttcgtatccggatccttttcttcagaataatagattgacgactttggtgtagaggattctgccagcctctgtgagaacttgttaaagaagtccatttaaggctttaaaattgaattgcgattataagattaaatggcagacacagacgatattatcgactatgaatccgatgatctcaccgaatacgaggatgatgaagaagaggaagaagatggagagtcactagaaactagtgatatagatcccaaatcttcttataagattgtagaatcagcatccactcatatagaagatgcgcattccaatcttaaacatatagggaatcatatatctgctcttaaacgacgctatactagacgtataagtctatttgaaatagcgggtataatagcagaaagctataacttgcttcaacgaggaagattacctctagtttcagaattttctgacgaaacgatgaagcaaaatatgctacatgtaattatacaagagatagaggagggttcttgtcctatagtcatcgaaaagaacggagaattgttgtcggtaaacgattttgacaaagatggtctaaaattccatctagactatattatcaaaatttggaaacttcaaaaacgatattagaatttatacgaatatcgttctctaaatgtcacaatcaagtctcgcatgttcagcaatttattgtcgtactttatatcgtgttcattaacgatatcttgcaaaatagtaatgattctatcttccttcgatagatattcttcagagattattgtcttatattctttcttgttatcagatatgaatttgataagactttgaacattattgatacccgtctgtttaattttttctacagatattttagttttggcagattctatcgtatctgtcaatagacatccaacatcgacattcgacgtcaattgtctataaatcaacgtataaattttagaaataacattagcgaattgttgtgcgttgatgtcgttattctgaaacagtatgattttaggtagcattttcttaacaaagagaacgtatttattgttactcagttgaacagatgatatatccagattactaacgcatctgattccgtataccaaactttcagaagaaatggtatacaattgtttgtattcattcaatgtctctttttcagaaattagtttagagtcgaatactgcaataattttcaagagatagttttcatcagataagattttatttagtgtagatatgataaaactattgttttgttggagaacttgatacgccgcgttctctgtagtcgacgctctcaaatgggaaacaatctccattatttttttggaatcggatactatatcttcggtatcttgacgcagtctagtatacatagagttaagagagattagagtttgtacattaagcaacatgtctctaaatgtggctacaaacttttcctttttcacatcatctagtttattatataccgatttcacaacggcaccagatttaaggaaccagaatgaaaaactctgataactacaatatttcatcatagttacgattttatcatcttctatagttggtgtaatagcgcatacctttttctccaagactggaaccaacgtcataaaaatgtttaaatcaaaatccatatcaacatctgatgcgctaagaccagtctcgcgttcaagattatctttactaatggtgacgaactcatcgtataaaactctaagtttgtccattatttatttacagatttagttgtttaatttatttgtgctcttccagagttgggatagtatttttctaacgtcggtattatattattaggatctacgttcatatgtatcataatattaatcatccacgttttgataaatctatctttagcttctgaaataacgtatttaaacaaaggagaaaaatatttagctacggcatcagacgcaataacattttttgtaaatgtaacgtatttagacgacagatcttcgttaaaaagttttccatctatgtagaatccatcggttgttaacaccattcccgcgtcagattgaataggagtttgaatagtttgttttggaaatagatccttcaataacttatagttgggtgggaaaaaatcgattttatcactagactctttcttttttactatcattacctcatgaactatttcttgaatgagtatatgtattttctttcctatatcggacgcgttcattggaaaatataccatgtcgttaactataagaatatttttatcctcgtttacaaactgaataatatcagatgtagttcgtaaacgaactatatcatcaccagcacaacatctaactatatgatatccactagtttcctttagccgtttattatcttgttccatattagcagtcattccatcatttaagaaggcgtcaaaaataatagggagaaatgacattttggattctgttacaactttaccaaaattaaggatatacggacttactatctttttctcaacgtcaatttgatgaacacacgatgaaaatgtgcttctatgagattgatcatgtagaaaacaacaagggatacaatatttccgcatatcatgaaatatattaagaaatcccaccttattatatttccccaaaggatccatgcacgtaaacattatgccgttatcattaataaagacttctttctcatcggatctgtaaaagttgttactgatttttttcattccaggatctagataattaataatgatgggttttctattcttattctttgtattttggcatatcctagaccagtaaacagtttccactttggtaaaatcagcagacttttgaacgctattaaacatggcattaatggcaataactaaaaatgtaaaatatttttctatgttaggaatatggtttttcactttaatagatatatggtttttggccaaaatgatagatatttttttatccgaggatagtaaaatattattagtcgccgtctctataaaaatgaagctagtctcgatatccaattttattctagaattgataggagtcgccaaatgtaccttatacgttatatctcccttgatgcgttccatttgtgtatctatatcggacacaagatctgtaaatagttttacgttattaatcatcacggtatcgccgtcgctagataacgctaatgtaccatccaagtcccaaatggagagatttaactgttcatcgtttagaataaaatgattaccggtcatattaataaagtgttcatcgtatctagataacaacgacttataattaatgtccaagtcttgaactcgctgaatgatcttttttaacccagttagttttagattggtacgaaatatattgttaaactttgattctacagtaatgtccaaatctagttgtggaaatacttccatcaacattgtttcaaacttgataatattattatctacatcttcgtacgatccaaattccggaatagatgtatcgcacgctctggccacccagataaccaaaaagtcacacgctccaggatatacattgtataaaaagctatcgttttttagtagggtttttttctgcgtgtatacgaagggattaaaaatagtattatcaacgtaactatattccaaattattcttatgagaatagataataatatcgtccttaatatctaacaaatttcctaaatatccctttaattgagtcattcgaagcgtcaatagaatatgtctcttaactatttccggctgttgtatatttaaatgacttcgtaaaaaataatatatgggcgacttctcatctatgtaatcatatggagtgagatatagggctcgttctacctcctgccccttacccacctgtaataccaattgcggacttactatatatcgcatatttatatcgtggggtaaagtgaaaatctactaccgatgatgtaagtcttacaatgttcgaaccagtaccagatcttaatttggaggcctccgtagaactaggggaggtaaatatagatcaaacaacacctatgataaaggagaatagcggttttatatcccgcagtagacgtctattcgcccatagatctaaggatgatgagagaaaactagcactacgattctttttacaaagactttattttttagatcatagagagattcattatttgttcagatgcgttgacgctgtaaaagacgtcactattaccaaaaaaaataacattatcgtggcgccttatatagcacttttaactatcgcatcaaaaggatgcaaacttacagaaacaatgattgaagcattctttccagaactatataatgaacatagtaagaaatttaaattcaactctcaagtatccatcatccaagaaaaactcggataccagtttggaaactatcacgtttatgattttgaaccgtattactctacagtagctctggctattcgagatgaacattcatctggcatttttaatatccgtcaagagagttatctggtaagttcattatctgaaataacatatagattttatctaattaatctaaaatctgatcttgttcaatggagtgctagtacgggcgctgtaattaatcaaatggtaaatactgtattgattacagtgtatgaaaagttacaactggtcatagaaaatgattcacaatttacatgttcattggctgtggaatcaaaacttccaataaaattacttaaagatagaaatgaattatttacaaaattcattaacgagttaaaaaagaccagttcattcaagataagcaaacgcgataaggatacgctactaaaatattttacttaggactggagttagaatttatagacgactcatttcgtttatcattgttactattattactattactatcattattagtgttggcattattagtattcttcttgtcatcttgttcagaaatatacagcaatgctatacctaatactaaatacattatcatgctcgcaatggctctaacaacaacgaaccaaaatgaatttggtcgtagcttttgttcacaaaaatacataaagaaatgtctacataaatctatggcgccattggctacttgaaatagcgccagtcctcctacagattttaatatagctgtataacatgacatttattcatcatcaaaagagacagagtcaccatctgtcatatttagattttttttcatgtgttcaaagtatcctctactcatttcattataatagtttatcatacttagaattttaggacggatcaatgagtaagacttgactagatcgtcagtagtaatttgtgcatcgtctattctgcatccgcttcgtcgaataatgtatagcatcgctttgagattctccatagctatcaagtctttatacaatgacatggaaatatctgtgaatactttatacttctccaacatcgatgccttaacatcatcgcctactttagcattgaaaatacgttctattgtgtagatggatgtagcaagatttttaaacaacaatgccatcttacacgatgattgcctcaagtctccaatcgtttgtttagaacgattagctacagagtccaatgcttggctgactagcatattattatctttagaaattgtattcttcaatgaggcgtttatcatatctgtgatttcgttagtcatattacagtctgactgggttgtaatgttatccaacatatcacctatggatacggtacacgtaccagcatttgtaataatcctatctaagatgttgtatggcattgcgcagaaaatatcttctcctgtaatatctccactctcgataaatctactcagattattcttaaatgccttattctctggagaaaagatatcagtgtccatcatttcattaatagtatacgcagaaaagataccacgagtatcaattctatccaagatacttatcggttccgagtcacagataatggtttcctctccttcgggagatcctgcatagaaatatctaggacaatagtttctatactgtctgtaactctgataatctctaaagtcactaactgataccatgaaattgagaagatcaaacgctgaagtaattaatttttctgcctcgtttttactacaactagttttcatcaatgtagtgacgatgtattgtttagttacttttggtctaatactgatgatagagatattattgcttcccataatggatcttctagtagtcaccttaaagcccattgatgcgaatagcagatagataaagtcttggtatgactcctttctaatatagtacggactacctttgtcacccaactttatacccacataagccataacaacctctttaatagccgtttcatgaggtttatcagccatgagcctgagtagttggaagaatctcatgaatcccgtctcagaaagtcctatatgcatgatagatttatctttcctgggaaactctcgtatagtcatagatgaaatactctttaaagtttctgaaataagattagtaacagtcttacctccgactactctaggtaacaaacaaactctaataggtgttttctctgcggagataatatcagaaaggatagagcaataagtagtattattgtgattataaagaccgaatacataacaggtagaatttataaacatcatgtcctgaaggtttttagacttgtattcctcgtaatccataccgtcccaaaacatggatttggtaactttgatagccgtagatctttgttccttcgccaacaggttaaagaaattaataaagaatttgttgtttctatttatgtccacaaattgcacgtttggaagcgccacggttacattcactgcagcattttgaggatcgcgagtatgaagtacgatgttattgtttactggtatatctggaaagaaatctaccagtctaggaataagagattgatatcgcatagaaatagtaaagtttataatctcatcatcgaagagcattttgttaccattgtaataaatatccactctgtcatatgtataaatgaagtactgttcaaacatgatgagatgtttatatgttggcatagtagtgagatcgacgtttggtaatggcaatgtattaagattaactccataatgtctagcagcatctgcgatgttataagcgtcgtcaaagcggggtcgatcttgtattgttatatattgtctaacacctataagattatcaaaatcttgtctgcttaatacaccgttaacaatttttgccttgaattcttttattggtgcattaataacatccttatagaggatgttaaacaaataagtgttatcaaagttaagatctggatatttcttttctgctagaacatccattgagtcggagccatctggtttaatataaccaccgataaatctagctctgtattctgtatccgtcaatctaatattaagaaggtgttgagtgaaaggtggaagatcgtaaaagctgtgagtattaatgataggattagtttccgaactaatgttaattggggtattaataatatctatatttccagcgttaagtgtaacattaaacagttttaattcacgtgacgtggtatcaattaaataattaatgcccaatttggatatagcagcctgaagctcatcttgtttagttacggatcctaatgagttattaagcaatatatcgaacggatgaacgaaggttgttttaagttggtcacatactttgtaatctagacatagatgcggaagaacggtagaaactatacgaaataaatattcagagtcctctaattgatcaagagtaactattgacttaataggcatcatttatttagtattaaatgacgaccgtaccagtgacggatatacaaaacgatttaattacagagttttcagaagataattatccatctaacaaaaattatgaaataactcttcgtcaaatgtctattctaactcacgttaacaacgtggtagatagagaacataatgccgccgtagtgtcatctccagaggaaatatcctcacaacttaatgaagatctatttccagatgatgattcaccggccactattatcgaacgagtacaacctcatactactattattgacgatactccacctcctacgtttcgtagagagttattaatatcggaacaacgtcaacaacgagaaaaaagatttaatattacagtatcgaaaaatgctgaagcaataatggaatctagatctatgataacttctatgccaacacaaacaccatccttgggagtagtttatgataaagataaaagaattcagatgttagaggatgaagtggttaatcttagaaatcaacgatctaatacaaaatcatctgataatttagataattttaccaaaatactatttggtaagactccgtacaaatcaacagaagttaataagcgtatagccatcgttaattatgcaaatttgaacgggtcccccttatcagtcgaggacttggatgtttgttcggaggatgaaatagatagaatctataaaacgattaaacaatatcacgaaagtagaaaacgaaaaattatcgtcactaacgtgattattattgtcataaacattatcgagcaggcattgctaaaactcggatttgaagaaatcaaaggactgagtaccgatatcacttcagaaattatcgatgtggagatcggagatgactgcgatgctgtagcatctaaactaggaatcggtaacagtccggttcttaatattgtattgtttatactcaagatattcgttaaacgaattaaaattatttaatttaatacattcccatatccagacaacaatcgtctggattaatctgttcctgtcgtctcataccggacgacatattaatctttttattagtgggcatctttttagatggtttctttttcccagcattaactgagtcgatacctagaagatcgtgattgatctctccgaccattccacgaacttctaattggccgtctctgacggtaccataaactattttaccagcattagtaacagcttggacaatctgaccatccatcgcattgtacgatgtagtagtaactgttgttctacgtctaggagcaccagaagtatttttggagcccttggatgttgatgtagaagaagacgaggattttgattttggtttacatgtaatacattttgaactctttgattttgtatcacatgcgccggcagtcacatctgtttgagaattaagattattgttgcctcctttgacggctgcatctccaccgatttgcgctagtagatttttaagctgtggtgtaatcttattaactgtttcgatataatcatcgtaactgcttctaacggctaaattttttttatccgccatttagaagctaaaaatatttttatttatgcagaagatttaactagattatacaatgaactaatatgatccttttccagattatttacaaacttggtattttttggttctggaggaggcgaatttaaattcggacttggattcggattttgtaagttcttgatcttattatacatcgagtataggatggcgacagtaactgctacacaaataccgatcaaaagaagaataccaatcatttattgacaataacttcactattgatcaagtatgcaatatatcatcttttcactaaataagtagtaataatgattcaacaatgtcgagatatatggacgataataatttagttcatggaaatatcgctatgattggtgtgaatgactccgctaactctgtggggtgcgcagtgctttccccacatagaataaattagcattccgactgtgataataataccaagtataaacgccataatactcaatactttccatgtacgagtgggactggtagacttactaaagtcaataaaggcgaagatacacgaaagaatcaaaagaatgattccagcgattagcacgccggaaaaataatttccaatcataagcatcatgtccatttaactaataaaaattttaaatcgccgaatgaacaaagtggaatataaaccatataaaaacaatagtttgtactgcaaaaataatatctatttttgttttcgaagatatggtaaaattaaatagtagtacacagcatgttataactaacagcagcaacggctcgtaattacttatcatttactagacgaaaaggtggtgggatattttcttgctcaaataatacgaatatatcacccatccattttatgcgatgtttatatactctaatctttaatagatctatagacgacgggtttaccaacaatatagattttatcgattcatctaatttaaacccttccttaaacgtgaatgatctattatctggcataacgatgaccctacctgatgaatcggacaatgtactgggccatgtagaataaattatcaacgaattatcgtctacgaacatttatatcatttgttttaattttaggacgcgaataaatggatataaaatagaaaataacagatattacaaccagtgttatggccgcgcccaaccaggtaggcagttttattttatcttttactacaggttctcctggatgtacgtcaccaacggcggacgtagttctagtacaattagacgtaagttccgcttgggaattttttaacgctaaagagttaacgttaatcgtgcacccaacgtatttacatctagttcgttgaacatcttgattataatataaccattttctatctctagattcgtcagtgcactcatgtaaccaacataccctaggtcctaaatatttatctccggaattagattttggataattcgcgcaccaacaatttctatttcctttatgatcgttacaaaagacgtataatgccgtatccccaaaagtaaaataatcaggacgaataattctaataaactcagaacaatatctcgcatccatatgtttggagcaaatatcggaataagtagacatagccggtttccgttttgcacgtaaccattctaaacaattggggtttccaggatcgtttctacaaaatccagtcatgaaatcgtcacaatgttctgtcttgtaattattattaaatatttttggacagtgtttggtatttgtcttagaacaacattttgccacgctatcactatcgcccaggagataatccttttttataaaatgacatcgttgcccggatgctatataatcagtagcgtgttttaaatccttaatatattcaggagttacctcgttctgataatagattaatgatccaggacgaaatttgaaagaactacatggttctccatgaattaatacatattgtttagcaaattcaggaactataaaactactacaatgatctatcgacataccatctatcaaacaaaacttgggtttaatttctcccggagatgtttcataatagtacgtataactttcttctgcaaacttaacagctctattatattcaggataattaaaacctaattccatatatttgtctcgtatatctgctattcctggtgctattttgattctattaagagtaacagctgcccccattcttaataatcgtcagtatttaaactgttaaatgttggtatatcaacatctaccttatttcccgcagtataaggtttgttgcaggtatactgttcaggaatggttacatttatacttcttctatagtcctgtctttcgatgttcatcacatatgcaaagaacagaataaacaaaataatgtaagaaataatattaaatatctgtgaattcgtaaatacattgattgccataataattacagcagctacaatacacacaatagacattcccacagtgttgccattacctccacgatacatttgagttactaagcaataggtaataactaagctagtaagaggcaatagaaaagatgagataaatatcatcaatatagagattagaggagggctatatagagccaagacgaacaaaatcaaaccgagtaacgttctaacatcattatttttgaagattcccaaataatcattcattcctccataatcgttttgcatcatacctccatctttaggcataaacgattgctgctgttcctctgtaaataaatctttatcaagcactccagcacccgcagagaagtcgtcaagcatattgtaatatcttaaataactcatttatatattaaaaaatgtcactattaaagatggagtataatctttatgccgaactaaaaaaaatgacttgtggtcaacccctaagtctttttaacgaagacggggatttcgtagaagttgaaccgggatcatcctttaagtttctgatacctaagggattttacgcctctccttccgtaaagacgagtctagtattcgagacattaacaacgaccgataataaaatcactagtatcaatccaacaaatgcgccaaagttatatcctcttcaacgcaaagtcgtatctgaagtagtttctaatatgaggaaaatgatcgaatcaaaacgtcctctatacatcactcttcacttggcgtgtggatttggtaagactattaccacgtgttatcttatggctacacacggtagaaaaaccgtcatttgcgtacccaataaaatgttaatacatcaatggaagacacaggtagaggcagtcggattggaacataagatatccatagatggagtaagtagtctattaaaggaactaaagactcaaagtccggatgtattaatagtagtcagtagacatctgacaaacgatgccttttgtaaatatatcaataagcattatgatttgttcatcttggatgaatcacatacgtataatctgatgaacaatacagcagttacaagatttttagcgtattatcctccgatgatgtgttattttttaactgctacacctagaccatctaaccgaatttattgtaacagtattattaatattgccaagttatccaatctaaaaaaaactatctatgcagtagatagtttttttgagccatattccacagataatattagacatatggtaaaacgactagatggaccatctaataaatatcatatatataccgagaagttattatctgtagacgagcctagaaatcaacttattcttgataccctggtagaagaattcaagtcaggaactattaatcgcattttagttattactaaactacgtgaacatatggtattattctacaaacgattattagattttttcggaccagaggttgtatttataggagacgcccaaaatagacgtactccagatatggtcaaatcaatcaaggaactaaatagatttatattcgtatccaccttattttattccggtactggtttagatattcctagtttggattcgttgttcatttgctcggcagtaatcaacaatatgcaaatagagcaattactagggagggtatgtcgagaaacagaactattagataggacggtatatgtatttcctaacacatccatcaaagaaataaagtacatgataggaaatttcatgcaacgaattattagtctgtctgtagataaactaggatttaaacaaaaaagttatcggaaacatcaagaatccgatcccacttctgcatgtacaacatcatccagagaagaacgtgtattaaatagaatatttaactcgcaaaatcgttaagaagtttaagcgacgatccgcatgctgcgcaggccagtgtattacccctcatagtattaatataatccaatgatacttttgtgatgtcggaaatcttaaccaatttagactgacaggcagaacacgtcatgcaatcatcatcgtcatcgataactgtagtcttgggcttctttttgcgactcttcattccggaacgcacattggtgctatccatttaggtagtaaaaaataagtcagaatatgccctataacacgatcgtgcaaaacctggtatatcgtctctatctttatcacaatatagtgtatcgacatttttattattattgacctcgtttatcttggaacatggaatgggaacatttttgttatcaacggccatctttgccttaattccagatgttgtaaaattataactaaacagtctatcatcgacacaaatgaaattcttgtttagacgtttgtagtttacgtatgcggctcgttcgcgtctcattttttcagatattgcaggtactataatattaaaaataagaatgaaataacataggattaaaaataaagttatcatgacttctagcgctgatttaactaacttaaaagaattacttagtctgtacaaaagtttgagattttcagattctgcggctatagaaaagtataattctttggtagaatggggaacatctacttactggaaaataggcgtgcaaaaggtagctaatgtcgagacgtcaatatctgattattatgatgaggtaaaaaataaaccgtttaatattgatccgggctattacattttcttaccggtatattttgggagcgtctttatttattcgaagggtaaaaatatggtagaacttggatctggaaactcttttcaaataccagatgatatgcgaagtgcgtgtaacaaagtattagacagcgataacggaatagactttctgagatttgttttgttaaacaatagatggataatggaagatgctatatcaaaatatcagtctccagttaatatatttaaactagctagtgagtacggattaaacatacccaaatatttagaaattgaaatagaggaagacacattatttgacgacgagttatactctattatagaacgctctttcgatgataaatttccaaaaatatccatatcgtatattaagttgggagaacttagacggcaagttgtagactttttcaaattctcattcatgtatattgagtccatcaaggtagatcgtataggagataatatttttattcctagcgttataacaaaatcaggaaaaaagatattagtaaaagatgtagaccatttaatacgatccaaggttagagaacatacatttgtaaaagtaaaaaagaaaaacacattttccattttatacgactatgatggaaacggaacagaaactagaggagaagtaataaaacgaattatagacactataggacgagactattatgttaacggaaagtatttctctaaggttggtagtgcaggcttaaagcaattgactaataaattagatattaatgagtgcgcaactgtcgatgagttagttgatgagattaataaatccggaactgtaaaacgaaaaataaaaaaccaatcagcatttgatttaagcagagaatgtttgggatatccagaagcggattttataacgttagttaataacatgcggttcaaaatagaaaattgtaaggttgtaaatttcaatattgaaaatactaattgtttaaataacccgagtattgaaactatatatggaaactttaaccagttcgtctcaatctttaatgtcgtcaccgatgtcaaaaaaagattattcgagtgaaataatatgcgcctttgatataggtgcaaaaaatcctgccagaactgttttagaagtcaaggataactccgttagggtattggatatatcaaaattagactggagttctgattgggaaaggcgcatagctaaagatttgtcacaatatgaatacactacagttcttctagaacgtcagcctagaaggtcgccgtatgttaaatttatctattttattaaaggctttttatatcatacatcggctgccaaagttatttgcgtctcgcctgtcatgtctggtaattcatatagagatcgaaaaaagagatcggtcgaagcatttcttgattggatggacacattcggattgcgagactccgttccggatagacgcaaattagacgatgtagcggatagtttcaatttggctatgagatacgtattagataaatggaatactaattatacaccttataataggtgtaaatctagaaattacataaaaaaaatgtaataacgttagtaacgccattatggataatctatttacctttctacatgaaatagaagatagatatgccagaactatttttaactttcatctaataagttgcgatgaaataggagatatatatggtcttatgaaagaacgcatttcctcagaggatatgtttgataatatagtgtataataaagatatacatcctgccattaagaaactagtgtattgcgacatccaacttactaaacacattattaatcagaatacgtatccggtatttaacgattcttcacaagtgaaatgttgtcattatttcgacataaactcagataatagcaatattagctctcgtacagtagagatatttgagagggaaaagtcatctcttgtatcatatattaaaactaccaataagaagagaaaggtcaattacggcgaaataaagaaaactgttcatggaggcactaatgcaaattacttttccggtaaaaagtctgacgagtatctgagtactacagttagatccaacattaatcaaccttggatcaaaaccatctctaagaggatgagagttgatatcattaatcactctatagtaacgcgtggaaaaagctctatattacaaactatagaaattatttttactaatagaacatgtgtgaaaatattcaaggattctactatgcacattattctatccaaggacaaggatgaaaaggggtgtatacacatgattgacaaattattctatgtctattataatttatttctgttgttcgaagatatcatccaaaacgagtactttaaagaagtagctaatgttgtaaaccacgtactcacggctacggcattagatgagaaattattcctaattaagaaaatggctgaacacgatgtttatggagttagcaatttcaaaatagggatgtttaacctgacatttattaagtcgttggatcataccgttttcccctctctgttagatgaggatagcaaaataaagttttttaaggggaaaaagctcaatattgtagcattacgatctctggaggattgtataaattacgtgactaaatccgagaatatgatagaaatgatgaaggaaagatcgactattttaaatagcatagatatagaaacggaatcggtagatcgtctaaaagaattgcttctaaaatgaaaaaaaacactaattcagaaatggatcaacgactagggtataagtttttggtgcctgatcctaaagccggagttttttatagaccgttacatttccaatatgtatcgtattctaattttatattgcatcgattgcatgaaatcttgaccgtcaagcggccactcttatcgtttaagaataatacagaacgaattatgatagaaattagcaatgttaaagtgactcctccagattactcacctataatcgcgagtattaaaggtaagagttatgacgcattagccacgttcactgtaaatatctttaaagaggtaatgaccaaagagggtatatccatcactaaaataagtagttatgagggaaaagattctcatttgataaaaattccgctactaataggatacgggaataaaaatccacttgatacagccaagtatcttgttcctaatgtcataggtggagtctttatcaataaacaatctgtcgaaaaagtaggaattaatctagtagaaaagattacaacatggccaaaatttagggttgttaagccaaactcattcactttctcgttttcctccgtatcccctcctaatgtattaccgacaagatatcgccattacaagatatctctggatatatcacaattggaagcgttgaatatatcatcgacaaagacatttataacggtcaatattgttttgctgtctcaatatttatctagagtgagtctagaattcattagacgtagtttatcatacgatatgcctccagaagttgtctatctagtaaacgcgataatagatagtgctaaacgaattactgaatctattactgactttaatattgatacatacattaatgacctggtggaagctgaacacattaaacaaaaatctcagttaacgatcaacgagttcaaatatgaaatgctgcataactttttacctcatatgaactatacacccgatcaactaaagggattttatatgatatctttactaagaaagtttctctactgtatcttccacacttctagatatccagatagagattcgatggtttgtcatcgcatcctaacgtacggcaaatattttgagacgttggcacatgatgaattagagaattacataggcaacatccgaaacgatatcatgaacaatcacaagaacagaggcacttacgcggtaaacattcatgtactaacaactcccggacttaatcacgcgttttctagcttattgagtggaaagttcaaaaagtcagacggtagttatcgaacacatcctcactattcatggatgcagaatatttctattcctaggagtgttggattttatccggatcaagtaaagatttcaaagatgttttctgtcagaaaataccatccaagtcaatatctttacttttgttcatcagacgttccggaaagaggtcctcaggtaggtttagtatctcaattgtctgtcttgagttccattacaaatatactaacgtctgagtatttggatttggaaaagaaaatttgtgagtatatcagatcatattataaagatgatataagttactttgaaacaggatttccaatcactatagaaaatgctctagtcgcatctcttaatccaaatatgatatgtgattttgtaactgactttagacgtagaaaacggatgggattcttcggtaacttggaggtaggtattactttagttagggatcacatgaatgaaattcgcattaatattggagcgggaagattagtcagaccattcttggttgtggataacggagagctcatgatggatgtgtgtccggagttagaaagcagattagacgacatgacattctctgacattcagaaagagtttccgcatgtcatcgaaatggtagatatagaacaatttacttttagtaacgtatgtgaatcggttcaaaaatttagaatgatgtcaaaggatgaaagaaagcaatacgatttatgtgactttcctgccgaatttagagatggatatgtagcatcttcattagtgggaatcaatcacaattctggacccagagctattcttggatgtgctcaagctaaacaagctatctcttgtctgagctcggatatacgaaataaaatagacaatggaattcatttgatgtatccagagaggccaatcgtgattagtaaggctttagaaacttcaaagattgcggctaattgcttcggccaacatgttactatagcattaatgtcgtacaaaggtatcaatcaagaggatggaattatcatcaaaaaacaatttattcagagaggcggtctcgatattgttacagccaagaaacatcaagtagaaattccattggaaaactttaataacaaagaaagagataggtctaacgcctattcaaaattagaaagtaatggattagttagactgaatgctttcttggaatccggagacgctatggcacgaaatatctcatcaagaactcttgaagatgattttgctagagataatcagattagcttcgatgtttccgagaaatataccgatatgtacaaatctcgcgttgaacgagtacaagtagaacttactgacaaagttaaggtacgagtattaaccatgaaagaaagaagacccattctaggagacaaatttaccactagaacgagtcaaaagggaacagtcgcgtatgtcgcggatgaaacggaacttccatacgacgaaaatggtatcacaccagatgtcattattaattctacatccatcttctctagaaaaactatatctatgttgatagaagttattttaacagccgcatattctgctaagccgtacaacaataagggagaaaaccgacctgtctgttttcctagtagtaacgaaacatccatcgatacatatatgcaattcgctaaacaatgttatgagcattcaaatccgaaattgtccgatgaagaattatcggataaaatcttttgtgaaaagattctctatgatcctgaaacggataagccttatgcatccaaagtattttttggaccaatttattacttgcgtctgaggcatttaactcaggacaaggcaaccgttagatgtagaggtaaaaagacgaagctcattagacaggcgaatgagggacgaaaacgtggaggaggtatcaagttcggagaaatggagagagactgtttaatagcgcatggtgcagccaatactattacagaagttttgaaagattcggaagaagattatcaagatgtgtatgtttgtgaaaattgtggagacatagcagcacaaatcaagggtattaatacatgtcttagatgttcaaaacttaatctctctcctctcttaacaaaaattgataccacgcacgtatctaaagtatttcttactcaaatgaacgccagaggcgtaaaagtcaaattagatttcgaacgaaggcctccttcgttttataaaccattagataaagttgatctcaagccgtcttttctggtgtaatattctagtttggtagtagatacatatcaatatcatcaaattcgagatccgaattataaaatgggcgtggattgttaactatagaatcggacgtctgatattcgaaaatctgtggagtttcaggttttggtggaggtgtaactgctacttgggatactgaagtctgatattcagaaagctgtggatgttctggttcggcatccaccgatggtgtcacatcactaatcggttcggtaacgtctgtggatggaggtgctacttctacagaacctgtagcctcagttgtcaacggagatacatttttaatgcgagaaaatgtataatttggtaatggtttcttatgtggatctgaagaagaggtaagatatctactagaaagataccgatcacgttctagttctcttttgtagaacttaactttttctttctccgcatctagttgatattccaacctcttcacgttactacgttcagattccaattcacgttcgcatgggttacctccgcagtttttacgagcgatttcacgttcagccttcatgcgtctctccctctctctatcgagtttatcagagcagtctttctgaaggcgatcgaactccataaatttctccaacgctttgattgtttccatagatttccgaagttcagcttttaggactgtgattctttttctttcgaattcacagctggatgtacaaccgtttccattaccgccatctctaagtttcttttctagatcggcaacatttcatccccatgccttttacattcctcgagtctactgtcgtcgaaatatcgttccagctccttttcgacatcaataactttagcacgttgtctctcaagctctcttttgtagttatctgattccctggcacgtttaagatcttcatgcaattgagtcagctcttaacttcctctcttgcttcttcgtcatagtacgcgcaatcactgtgagatccattgttaccacgtctacactcggcgagctcgcgtttaagagattcaatttcccgtttgtattggtccatgtttccattgctaccaccattagatttacaggctgctagttgtcgttcgagatcagaaatacgggttttcttggaattgatttcgtcgatgtacttggcatcgaaacacttattaagttctttttccaattctacgattttatttctttcgcgagtcaattccctcctgtagtaactatctgttttgtcagattcacgctctctacgtagactttcttgcaagttactaatttgttccctagcacgtccgagtttagttttatatgctgaatagagttctgattcatcctttgagcagatctctagcgatcgtttaagattcctaattctagtctttagcctatttacctcctcagaagatgttccgttaccgttgcgtttacactcgttaagctgtctatcaagatccatgattctatctctaagacgttgcatctctctttccatatcagcattgctttcattattacgtctgcagtcactcaactgtctttcaatatctgagattctatctctaagacgtcgcatctctctctgtttcggcattggtttcattattacgtttacagtcgttcaactgtctttcaagatctgatattctagattggagtctgctaatctctgtagcattttcacggcattcactcagttgtctttcaagatctgaaattttagattggagtctgctaatctctgtaagatttcctcctccgctctcgatgcagtcggtcaacttattctctagttctctaatacgcgaacgcagtgcatcaacttcttgcgtgtcttcctggttgcgtgtacattcatcgagatctctaacgcgtcgtcgttcttcctcaagttctctgcgtactacagaaagcgtgtccctatcttgttgatatttagcaatttctgattctagagtactgattttgcttacgtagttactaatagttgtcttggccttatcaagatcctccttgtatttgtcgcattccttgatatccctacgaagtctggacagttcccattcgacattacgacgtttatcgatttcagctcggagatcgtcatcgcgttgttttagccacatacgactgagttcaagttctcgttgacaagatccatctacttttccattcctaatagtatccagttccttttctagttctgaacgcatttctcgttccctatcaagcgattctctcaattctcggatagtcttcttatcaatttctaataaatctgaaccatcatctgtcccattttgaatatccctgtgttctttgatctcttttgtaagtcggtcgattctttcggttttataaacagaatccctttccaaagtcctaatcttactgagtttatcactaagttctgcattcaattcggtgagttttctcttggcttcttccaactctgttttaaactctccactatttccgcattcttcctcgcatttatctaaccattcaattagtttattaataactagttggtaatcagcgattcctatagccgttcttgtaattgtgggaacataattaggatcttctaatggattgtatggcttgatagcatcatctttatcattattagggggatggacaaccttaattggttggtcctcatctcctccagtagcgtgtggttcttcaataccagtgttagtaataggcttaggcaaatgcttgtcgtacgcgggcacttcctcatccatcaagtatttataatcgggttctacttcagaatattcttttctaagagacgcgacttcgggagttagtagaagaactctgtttctgtatctatcaacgctggaatcaatactcaagttaaggatagcgaatacctcatcgtcatcatccgtatcttctgaaacaccatcatatgacatttcatgaagtctaacgtattgataaatagaatcagatttagtattaaacagatccttaacctttttagtaaacgcatatgtatattttagatctccagatttcataatatgatcacatgccttaaatgtcagtgcttccatgatataatctggaacactaatgggtgacgaaaaagatacagcaccatatgctacgttgataaataaatctgaaccactaagtagataatgattaatgttaagaaagaggaaatattcagtgtataggtatgtcttggcgtcatatcttgtactaaacacgctaaacagtttgttaatgtgatcaatttccaatagattaattagagcagcgggaataccaacaaacatattaccacatccgtattttctatgaatatcacatatcatgttaaaaaatcttgatagaagagcgaatatctcgtctgacttaatgagtcgtagttcagcagcaacataagtcataactgtaaatagaacatactttcctgtagtgttgattctagactccacatcaacaccattattaaaaatagttttatatacatctttaatctgctctccgttaatcgtcgaacgttctagtatacggaaacactttgatttcttatctgtagttaatgacttagtgatatcacgaagaatattacgaattacatttcttgtttttcttgagagacctgattcagaactcaactcatcgttccatagtttttctacctcagtggcgaaatctttggagtgcttggtacatttttcaataaggttcgtgacctccatttattataaaaaatttattcaaaacttaactacaatcgggtaattataagatcgtagatctcccatgtggcggaatactaccatctatcgcatgtggatggacagtaggtaatggccatgggaacagtaatgtttgcatatttatctttcttgctagtattactgcatattgtcccaatgtttcgatgtgatgttctaacctatcaactgccgctgtatcacaacaatagtgtccgatgaaattaagattatgatccaatgtgtttaatatatgattatcaagtcttatacgatccgcgtcttttttgacaggatcaggttcttctacaggaagaagtttcggcctcttatgatattcatgtctgggaaacggtggtctagggtgaggctccggtatcggagtgggttttggattataatcatcatcgtctatgacatcatcttcgacttcgatatttattttgctatcttgatgatgtcctgtatcagttgcattttcagcactcgactgaatattagcgcattcattgtctattattaccatatttctaaacccaaaatgtatgtgttgaacatcagtactatcgttgatgagtcttatagcatgaattcgcttatcgttatcgggtttatcttctgtcaccttagcaattccttttttattaaactctacataatcatatccatttctattgtttgttctaatataaacgagtatagcatcattgctaaatttttcaatagtatcaaaaacagaatatcctaaaccatataatatatattcaggaacactcaaactaaatgtccaggattctcctaaatacgtaaactttaatagtgcgaaatcattcaaaaatctaccacttatagatagatagtacataaatgcgtatagtagtctacctatctctttattatgaaaaccggcattacgatcatatatgtcgtgatatacctgtgatccgtttacgttaaaccataaatacatgggtgatcctataaacatgaatttatttctaattctcagagctatagttaattgaccgtgtaatatttgcttacatgcatacttgatacgcttattaataagatttttatcattgctcgttatttcagaatcgtatatataaggagtaccatcgtgattcttaccagatattatacaaaatactatatataaaatatattgacccacgttagtaatcatataaatgtttaacgttttaaattttgtattcaatgatccattatcatacgctatcatggtcttgtaatattcattctttaaaatataatattgtgttagccattgcattggagctcctaatggagattttctattctcatccattttaggataggctttcataaagtccctaataacttcgtgaataatgtttctatgttttctactgatgcatgtatttgcttcgatttttttatcccatgtttcatctatcatagatttaaacgcagtaatgctcgcaacattaacatcttgaaccgttggtacaattccgttccataaatttataatgttcgccatttatataactcattttttgaatatacttttaattaacaaaagagttaagttactcatatggacgccgtccagtctgaacatcaatctttttagccagagatatcatagccgctcttagagtttcagcgtgattttccaacctaaatagaacttcatcgttgcgtttacaacacttttctatttgttcaaactttgttgttacattagtaatctttttttccaaattagttagccgttgtttgagagtttcctcattgtcgtcttcatcggctttaacaattgcttcgcgtttagcctctggctttttagcagcctttgtagaaaaaaattcagttgctggaattgcaagatcgtcatctccggggaaaagagttccgtccatttaaagtacagattttagaaactgacactctgcgttatttatatttggtacaacacatggattataaatattgatgttaataacatcagaaaatgtaaagtctatacattgttgcatcgtgttaaattttctaatggatctagtattattgggtccaacttctgcctgaaatccaaatatggaagcggatacaaaaccgtttcctggataaaccacacatctccacttttgctttacatcagaaattgtgtcgttgacatcttgaactctcctatctaatgccggtgttccacctatagattttgaatattcgaatgctgcatgagtagcattaaattccttaatattgccataattttcatatattgagtaaccctggataaaaagtaaacacaccgcagccgtcgctaccacaataaaaaaaattgatagagagttcatttataatctattagaagctgacaaaatttttttacacgcatcagacaatgctttaataaatagttcaacatctacttttgtcatatcgaaccgatggtatgattctaacctagaattacatccgaaaaagttgactatgttcatagtcattaagtcattaacaaacaacattccagactctggattataagacgatactgtttcgtcacaattacctaccttaatcatgtgattatgaatattggctattagagcaccttctaagaaatctataatatctttgaaacacgatttaaaatcaaaccacgaatatacttctacgaagaaagttagtttacccataggagaaataactataaatggagatctaaatacaaaatccggatctatgatagttttaacattattatattctctattaaatacctccacatctaaaaatgttaattttgaaactatgtcttcgtttattaccgtacctgaactaaacgctataagctctattgtttgagaactctttaaacgatattcttgaaatacatgtaacaaagtttcctttaactcggtcggtttatctaccatagttacagaatttgtatccttatctataatataataatcaaaatcgtataaagttatataattatcgcgttcagattgtgatcttttcaaatagactaaaaaccccatttctctagtaagtatcttatgtatatgtttgtaaaatatcttcatggtgggaatatgctctaccgcagttagccattcctcattgacagcggtagatgtattagacaaaactattccaatgtttaacaagggccattttacgagattattaaatccttgtttgataaatgtagccaatgagggttcgagttcaacgacgattgaattctcttcccgcggatgctgcatgatgaacgacgggatgttgttcgattgatttggaattctttttcgactttttgtttatattaaatattttaaaatttatagcggatagcaattcatgtaccacggataatgtagacgcgtattgcgcatcgatatctttattattagataaatttatcaataaatgtgagaagtttgcctcgttaaggtcttccatttaaatattatataaacatttgtgtttgtatcttattcgtcttttatggaatagttttttactagtaaagctgcaattacacactttgtccgtaaaacataaatataaacaccagcttttatcaatcgttccaaaaagtcgacggcggacatttttaacatggcatctattttaaatacacttaggtttttggaaaaaacatcattttataattgtaacgattcaataactaaagaaaagattaagattaaacataagggaatgtcatttgtattttataagccaaagcattctaccgttgttaaatacttgtctggaggaggtatatatcatgatgatttggttgtattggggaaggtaacaattaataatctaaagatgatgctattttacatggatttatcatatcatggagtgacaagtagtggagcaatttacaaattgggatcgtctatcgatagactttctctaaataggactattgttacaaaagttaataattatgatgatacattttttgacgacgatgattgatcgctattgcacaattttgtttttgtactttctaatatagtgtttaggttctttttcatatgagaatattgatttactaaaatatctatgtttaacttttgttctatgacgtccttatcggcggtatcggtacatatacgtaattcaccttcacaaaatacggagtcttcgataataatagccaatcgattattggatctagctgtctgtatcatattcaacatgtttaatatatcctttcgtttcccctttacaggcatcgatcgtagcatattttccgcgtctgatatggaaatgttaaaactacaaaaatgcgtaatgttagcccgtcctaatattggtacgtgtctataagtttggcatagtagaataatagacgtgtttaaatgccttccaaagtttaagaattctattagagtattgcattttgatagtttatcgcctacatcatcaaaaataagtaaaaagtgtgctgattttttatgattttgtgcgacagcaatacatttttctatgttacttttagttcgtatcagattatattctagagattcctgactactaacgaaattaatatgatttggccaaatgtatccatcataatctgggttataaacgggtgtaaacaagaatatatgtttatattttttaactagtgtagaaaacagagatagtaaatagatagtttttccagatccagatcctcctgttaaaaccattctaaacggcatttttaataaattttctcttgaaaattgtttttcttggaaacaattcataattatatttacagttactaaattaatttgataataaatcaaaatatggaaaactaaggttgttagtagggaggagaacaaagaaggcacatcgtgatataaataacatttattatcatgatgacaccagaaaacgacgaagagcagacatctgtgttctccgctactgtttacggagacaaaattcagggaaagaataaacgcaaacgcgtgattggtctatgtattagaatatctatggttatttcactactatctatgattaccatgtccgcgtttctcatagtgcgcctaaatcaatgcatgtctgctaacgaggctgctattactgacgccgctgttgccgttgctgctgcatcatctactcatagaaaggttgcgtctagcactacacaatatgatcacaaagaaagctgtaatggtttatattaccagggttcttgttatatattacattcagactaccagttattctcggatgctaaagcaaattgcactgcggaatcatcaacactacccaataaatccgatgtcttgactacctggctcattgattatgttgaggatacatggggatctgatggtaatccaattacaaaaactacatccgattatcaagattctgatgtatcacaagaagttagaaagtatttttgtgttaaaacaatgaactaatatttatttttgtacattaataaatgaaatcgcttaatagacaaactgtaagtaggtttaagaagttgtcggtgccggccgctataatgatgatactctcaaccattattagtggcataggaacatttctgcattacaaagaagaactgatgcctagtgcttgcgccaatggatggatacaatacgataaacattgttatttagatactaacattaaaatgtctacagataatgcggtttatcagtgtcgtaaattacgagctagattgcctagacctgatactagacatctgagagtattgtttagtattttttataaagattattgggtaagtttaaaaaagaccaatgataaatggttagatattaataatgataaagatatagatattagtaaattaacaaattttaaacaactaaacagtacgacggatgctgaagcgtgttatatatacaagtctggaaaactggttaaaacagtatgtaaaagtactcaatctgtactatgtgttaaaaaattctacaagtgacaacaaaaaatgaattaataataagtcgttaacgtacgccgccatggacgccgcgtttgttattactccaatgggtgtgttgactataacagatacattgtatgatgatctcgatatctcaatcatggactttataggaccatacattataggtaacataaaaactgtccaaatagatgtacgggatataaaatattccgacatgcaaaaatgctactttagctataagggtaaaatagttcctcaggattctaatgatttggctagattcaacatttatagcatttgtgccgcatacagatcaaaaaataccatcatcatagcatgcgactatgatatcatgttagatatagaagataaacatcagccattttatctattcccatctattgatgtttttaacgctacaatcatagaagcgtataacctgtatacagctggagattatcatctaatcatcaatccttcagataatctgaaaatgaaattgtcgtttaattcttcattctgcatatcagacggcaatggatggatcataattgatgggaaatgcaatagtaattttttatcataaaagttgtaaagtaaataataaaacaataaatattgaactagtagtacgtatattgagcaatcagaaatgatgctggtacctcttatcacggtgaccgtagttgcgggaacaatattagtatgttatatattatatatttgtaggaaaaagatacgtactgtctataatgacaataaaattatcatgacaaaattaaaaaagataaagagttctaattccagcaaatctagtaaatcaactgatagcgaatcagactgggaggatcactgtagtgctatggaacaaaacaatgacgtagataatatttctaggaatgagatattggacgatgatagcttcgctggtagtttaatatgggataacgaatccaatgttatggcgcctagcacagaacacatttacgatagtgttgctggaagcacgctgctaataaataatgatcgtaatgaacagactatttatcagaacactacagtagtaattaatgaaacggagactgttgaagtacttaatgaagataccaaacagaatcctaactattcatccaatcctttcgtaaattataataaaaccagtatttgtagcaagtcaaatccgtttattacagaacttaacaataaatttagtgagaataatccgtttagacgagcacatagcgatgattatcttaataagcaagaacaagatcatgaacacgatgatatagaatcatcggtcgtatcattggtgtgattagtttcctttttataaaattgaagtaatatttagtattattgctgccgtcacgttgtacaaatggagatattccctgtattcggcatttctaaaattagcaattttattgctaataatgactgtagatattatatagatacagaacatcaaaaaattatatctgatgagatcaatagacagatggatgaaacggtacttcttaccaacatcttaagcgtagaagttgtaaatgacaatgagatgtaccatcttattcctcatagattatcgacgattatactctgtattagttctgtcggaggatgtgttatctctatagataatgacatcaatggcaaaaatattctaacctttcccattgatcatgctgtaatcatatccccactgagtaaatgtgtcgtagttagcaagggtcctacaaccatattggttgttaaagcggatatacctagcaaacgattggtaacatcgtttacaaacgacatactatatgtaaacaatctgtcactgattaattatttgccgttgtctgtattcattattagacgagtcaccgactatttggatagacacatatgcgatcagatatttgctaataataagtggtattcccttataaccatcgacgataagcaatatcctattccatcaaactgtataggtatgtcctctgccaagtacataaattctagcatcgagcaagatactttaatccatgtttgtaacctcgagcatccgttcgactcagtatacaaaaaaatgcagtcgtacaattctctacctatcaaggaacaaatattgtacggtagaattgataatataaatatgagcattagtatttctgtggattaatagatttctagtatggggatcattaatcatctctaatctctaaatacctcataaaacgaaaaaaaagctattatcaaatactgtacggaatggattcattctcttctctttttatgaaactctgttgtatatctactgataaaactggaagcaaaaaatctgatagaaagaataagaataagatcaaggattatatggaacacgattattataaaataacaatagttcctggttcctcttccacgtctactagctcgtggtattatacacatgcctagtaatagtctctttgcgttgacggaaagcagactagaaataacaggctaaaatgttcagacaccataatagttcccaacccagataataacagagttccatcaacacattcctttaaactcaatcccaaacccaaaaccgttaaaatgtatccggccaattgatagtagataatgaggtgtacagcgcatgataatttacacagtaaccaaaatgaaaatactttagtaattataagaaatatagacggtaatgtcatcatcaacaatccgataatatgcctgagagtaaacattgacggataaaacaaaaatgctccgcataactctatcatggcaataacacaaccaaatacttgtaagattcctaaattagtagaaaatacaacgaatatcgatgtataagtgatctcgagaaataataagaataaagtaatgcccgtaaagataaacatcaacattgtttggtaatcattaaaccaattagtatgaagttgaactaatttcacagtagattttattccagtgttatcctcgcatgtataagtacctggtaagatatctttatattccataatcaatgagacatcactatctgataacgaatgaagtctagcactagtatgccatttacttaatattgtcgtcttggaagttttattataagttaaaatatcatggttatccaatttccatctaatatactttgtcggattatctatagtacacggaataatgatggtatcattacatgctgtatactctatggtctttgtagttgttataacaaccaacgtatagaggtatatcaacgatattctaactcttgacattttttatttatttaaaatgatacctttgttatttattttattctattttgctaacggtattgaatggcataagtttgaaacgagtgaagaaataatttctacttacttattagacgacgtattatacacgggtgttaatggggcggtatacacattttcaaataataaactaaacaaaactggtttaactaataataattatataacaacatctataaaagtagaggatgcggataaggatacattagtatgcggaaccaataacggaaatcccaaatgttggaaaatagacggttcagacgacccaaaacatagaggtagaggatacgctccttatcaaaatagcaaagtaacgataatcagtcacaacggatgtgtactatctgacataaacatatcaaaagaaggaattaaacgatggagaagatttgacggaccatgtggttatgatttattcacggcggataacgtaattccaaaagatggtttacgaggagcattcgtcgataaagacggtacttatgacaaagtttacattcttttcactgatactatcggctcaaagagaattgtcaaaattccgtatatagcacaaatgtgcctaaacgacgaaggtggtccatcatcattgtctagtcatagatggtcgacgtttctcaaagtcgaattagaatgtgatatcgacggaagaagttatagacaaattattcattctagaactataaaaacagataatgatacgatactatatgtattcttcgatagtccttattccaagtccgcattatgtacctattctatgaataccattaaacaatctttttctacgtcaaaattggaaggatatacaaagcaattgccgtctccagctcctggtatatgtttaccagctggaaaagttgttccacataccacgtttgaagtcatagaacaatataatgtactagatgatattataaagcctttatctaaccaacctatcttcgaaggaccgtctggtgttaaatggttcgatataaaggagaaggaaaatgaacatcgggaatatagaatatacttcataaaagaaaattctatatattcgttcgatacaaaatctaaacaaactcgtagctcgcaagtcgatgcgcgactattttcagtaatggtaactgcgaaaccgttatttatagcagatatagggataggagtaggaatgccacaaatgaaaaaaatacttaaaatgtaatcttaatcgagtacaccacacgacaatgaacaaacataagacagattatgctggttatgcttgctgcgtaatatgcggtctaattgtcggaattatttttacagcgacactattaaaagttgtagaacgtaaattagttcatacaccattaatagataaaacgataaaagatgcatatattagagaagattgtcctactgactggataagctataataataaatgtatccatttatctactgatcgaaaaacctgggaggaaggacgtaatgcatgcaaagctctaaattcaaattcggatctaattaagatagagactccaaacgagttaagttttttaagaagccttagacgaggctattgggtaggagaatccgaaatattaaaccagacaaccccatataattttatagctaagaatgccacgaagaatggaactaaaaaacggaaatatatttgtagcacaacgaatactcccaaactgcattcgtgttacactatataacaattacactacatttttatcataccactacttcggttagatgttttagaaaaaaataaatatcgccgtaccgttcttgtttttataaaaataacaattaacaattatcaaattttttctttaatattttacgtggttgaccattcttggtggtaaaataatctcttagtgttggaatggaatgctgtttaatgtttccacactcatcgtatattttgacgtatgtagtcacatcgtttacgcaatagtcagactgtagttctatcatgcttcctacatcagaaggaggaacagttttaaagtctcttggttttaatctattaccgttagttttcatgaaatcctttgttttatccacttcacattttaaataaatgtccactatacattcttttgttaattttactagatcgtcatgggtcatagaatttataggttccgtagtccatggatccaaactagcaaacttcgcgtatacggtatcgcgattagtgtatacaccaactgtatgaaaattaagaaaacagtttaataaatcaacagaaatatttaatcctccgtttgatacagatgcgccatatttatggatttcggattcacacgttgtttgtctgaggtgttcgtctagtgttgcttctacgtaaacttcgattcccatatattctttattgtcagaatcgcataccgatttatcatcatacactgtttgaaaactaaatggtatacacatcaaaataataaataataacgagtacattctgcaatattgttatcgtaattggaaaaatagtgttcgagtgagttggattatgtgagtattggattgtatattttattttatattttgtaataagaataaaatgctaatgtcaagtttattccaatagatgtcttattaaaaacatatataataaataacaatggctgaatggcataaaattatcgaggatatctcaaaaaataataagttcgaggatgccgccatcgttgattacaagactacaaagaatgttctagctgctattcctaacagaacatttgccaagattaatccgggtgaaattattcctctcatcactaatcgtaatattctaaaacctcttattggtcagaaatattgtattgtatatactaactctctaatggatgagaacacgtatgctatggagttgcttactgggtacgcccctgtatctccgatcgttatagcgagaactcataccgcacttatatttttgatgggtaagccaacaacatccagacgtgacgtgtatagaacgtgtagagatcacgctacccgtgtacgtgcaactggtaattaaaataaaaagtaatattcatatgtagtgtcaattttaaatgatgatgatgaaatggataatatccatattgacgatgtcaataatgccggtattggcatacagttcatcgatttttagatttcattcagaggatgtggaattatgttatgggcatttgtattttgataggatctataatgtagtaaatataaaatataatccgcatattccatatagatataattttattaatcgcacgttaaccgtagatgaactagacgataatgtcttttttacacatggttattttttaaaacacaaatatggttcacttaatcctagtttgattgtctcattatcaggaaacttaaaatataatgatatacaatgctcagtaaatgtatcgtgtctcattaaaaatttggcaacgagtacatctactatattaacatctaaacataagacttattctctacatcggtccacgtgtattactataataggatacgattctattatatggtataaagatataaatgacaagtataatgacatctatgattttactgcaatatgtatgctaatagcgtctacattgatagtgaccatatacgtgtttaaaaaaataaaaatgaactcttaattatgctatgctattagaaatggataaaatcaaaattacggttgattcaaaaattggtaatgttgttaccatatcgtataacttggaaaagataactattgatgtcacacctaaaaagaaaaaagaaaaggatgtattattagcgcaatcagttgctgtcgaagaggcaaaagatgtcaaggtagaagaaaaaaatattatcgatattgaagatgacgatgatatggatgtagaaagcgcgtaatacgatctataaaaataagtatataaatactttttatttactgtactcttactgtgtagtggtgataccctactcgattatttttttaaaaaaaaaatacttattctgattcttctagccatttccgtgttcgtttgaatgccacatcgacgtcaaagataggggagtagttgaaatctagttctgcattgttggtacgcacctcaaatgtagtgttggatatcttcaacgtatagttgttgagtagtgatggttttctaaatagaattctcttcatatcattcttgcacgcgtacatttttagcatccatcttggaatcctagatccttgttctattcccaatggtttcatcaatagaagattaaacatatcgtacgaacacgatggagagtaatcgtagcaaaagtaagcatttcctttaatcttagatcccggatactggatatattttgcagccaacacgtgcatccatgcagcatttcctacatatacccggctatgcaccgcgtcatcatcgactgtacgatacataatgttaccgtgttgcttacattgctcgtaaaagactttcatcaatttgtctccttctccgtaaattccagtgggtcttaggcaacaagtatacaattttgctccattcatgattacggaattattggctttcataaccagttgctcggccatacgtttactttttgcgtatacatgtcctggtgatatatcataaagggtatgctcatggccgatgaatggatcaccgtgtttattgggtcctattgcttccatgctactagtatagatcaaatacttgattcctaggtccacacaagctgccaaaatagtctgtgttccataatagtttactttcatgatttcattatcggtgtattttccaaatacatccactagagcagccgtatgaataatcagatttaccccatctagcgcttctctcaccttatcaaagtcgtttatatcacattgtatatagtttataaccttaactttcgaggttattggttgtggatcttctacaatatctatgactctgatttcttgaacatcatctgcactaattaacagttttactatatacctgcctagaaatccggcaccaccagtaaccgcgtacacggccattgctgccactcataatatcagactacttattctattttactaaataatggctgtttgtataatagaccacgataatatcagaggagttatttactttgaaccagtccatggaaaagataaagttttaggatcagttattggattaaaatccggaacgtatagtttgataattcatcgttacggagatattagtcaaggatgtgattccataggcagtccagaaatatttatcggtaacatctttgtaaacagatatggtgtagcatatgtttatttagatacagatgtaaatatatttacaattattggaaaggcgttatctatttcaaaaaatgatcagagattagcgtgtggagttattggtatttcttacataaatgaaaagataatacattttcttacaattaacgagaatggcgtttgatatatcagttaatgcgtctaaaacaataaatgcattagtttacttttctactcagcaaaataaattagtcatacgtaatgaagttaatgatacacactacactgtcgaatttgatagggacaaagtagttgacacgtttatttcatataatagacataatgacaccatagagataagaggggtgcttccagaggaaactaatattggttgcgcggttagtatgacttacttgtataataagtatagttttaaactgattttagcagaatatataagacacagaaatactatatccggcaatatttattcggcattgatgacactagatgatttggctattaaacagtatggagacattgatctattatttaatgagaaacttaaagtagactccgattcgggactatttgactttgtcaactttgtaaaggatatgatatgttgtgattctagaatagtagtagctctatctagtctagtatctaaacattgggaattgacaaataaaaaatataggtgtatggcattagccgaacatatatctgatagtattccaatatctgagctatctagactacgatacaatctatgtaagtatctacgcggacacactgagagcatagaggataaatttgattattttgaagacgatgattcgtctacatgttctgccgtaaccgacagggaaacggatgtataattttttttatagcgtgaaggatatgataaaaaatataattgttgtatttatcccattccaatcaccttatatgattctgtaacacaataaaggagtcttatagatgtatagaggtcagatactggtttgataaactgtttattccacataagtatgtttgactttatggttagacccgcatactttaacaaatcactgaaaattggagttaggtattgacctctcagaatcagttgccgttctggaacattaaatgtattttttatgatatactccaacgcatttatgtgggcatacaacaagtcattactaatggaatattccaagagttttagttgtctagtatttaacaagagaagagatttcaacagactgtttatgaactcgaatgccgcctcattgtcgcttatattgatgatgtcgaattctcccaatatcatcaccgatgagtagctcatcttgttatcgggatccaagttttctaaagatgtcattaaaccctcgatcatgaatggatttatcatcatcgtttttatgttggacatgagcttagtccgtttgtccacatctatagaagatgatttctgaattatttcatatatctctctctttaactccaggaacttgtcaggatggtctactttaatatgttctcgtctaagagatgaaaatctttggatggttgcacgcgacttttctctaaaggatgacgttgcccaagatcctctcttaaatgaatccatcttatccttggacaagatggacagtctattttccttagatggtttaatatttttgttacccatgatctataaaggtagacctaatcgtctcggatgaccatatatttattttcagttttattatacgcataaattgtaaaaaatatgttaggtttacgaaaatgtctcgtggggcattaatcgtttttgaaggattggacaaatctggaaaaacaacacaatgtatgaacatcatggaatcaataccttcaaacacaataaaataccttaactttcctcagagatccactgtcactggaaagatgatagatgactatctaactcgtaaaaaaacctataatgatcatatagttaatctattattttgtgcaaatagatgggagtttgcatcttttatacaagaacaactagaacagggaattactttaatagttgatagatacgcattttctggagtagcgtatgccgccgctaaaggcgcgtcaatgactctcagtaagagttatgaatctggattgcctaaacccgacttagttatattcttggaatctggtagcaaagaaattaatagaaacgtcggtgaggaaatttatgaagatgttacattccaacaaaaggtattacaagaatataaaaaaatgattgaagaaggagatattcattggcaaattatttcttctgaattcgaggaagatgtaaagaaggagttgattaagaatatagttatagaggctatacacacggttactggaccagtggggcaactgtggatgtaatagtgaaattacattttttataaatagatgttagtacagtgttataaatggatgaagcatattactctggcaacttggaatcagtactcggatacgtgtccgatatgcataccgaactcgcatcaatatctcaattagttattgccaagatagaaactatagataatgatatattaaacaaggacattgtaaattttatcatgtgtagatcaaacttggataatccatttatctctttcctagatactgtatatactattatagatcaagagaactatcagactgagttgattaattcattagacgacaatgaaattatcgattgtatagttaataagtttatgagcttttataaggataacctagaaaatatagtagatgctatcattactctaaaatatataatgaataatccagattttaaaactacgtatgccgaagtactcggttccagaatagccgatatagatattaaacaagtgatacgtaagaatatactacaattgtctaataatatccgcgaacgatatttgtgaaaatattaaaaaaaaatactttttttattaaatgacgtcttttcgtgaatttagaaaattatgctgtgctatatatcacgcatcaggatataaagaaaaatctaaattaattagagactttataacagatagggatgataaatatttgatcattaagctattgcttcccggattagacgatagaatttataacatgaacgataaacaaattataaaattatatagtataatatttaaacaatctcaggaagatatgctacaagatttaggatacggatatataggagacactattaggactttcttcaaagagaacacagaaatccgtccacgagataaaagcattttaactttagaagaagtggatagttttttaactacgttatcatccgtaactaaagaatcgcatcaaataaaattattgactgatgtagcatctgtttgtacatgtaatgatttaaaatgtgtagtcatgcttattgataaagatctaaaaattaaagcgggtcctcggtacgtacttaacgctattagtcctaatgcctatgatgtgtttagaaaatctaataacttgaaagagataatagaaaattcatctaaacaaaatctagactctatatctatttctgttatgactccaattaatcccatgttagcggaatcgtgtgattctgtcaataaggcgtttaaaaaatttccatcaggaatgtttgcggaagtcaaatacgatggtgaaagagtacaagttcataaaaataataacgagtttgccttctttagtagaaacatgaaaccagtactctctcataaagtggattatctcaaagaatacataccgaaagcatttaaaaaagctacgtctatcgtattggattctgaaattgttcttgtagacgaacataatgtaccgctcccgtttggaagtttaggtatacacaaaaagaaagaatataaaaactctaacatgtgtttgttcgtgtttgactgtttgtactttgatggattcgatatgacggacattccattgtacgaacgaagatcttttctcaaagatgttatggttgaaatacccaatagaatagtattctcagagttgacgaatattagtaacgagtctcagttaactgacgtattggatgatgcactaacgagaaaattagaaggattggtcttaaaagatattaatggagtatacgaaccgggaaagagaagatggttaaaaataaagcgagactatttgaacgagggttccatggcagattctgccgatttagtagtactaggtgcctactatggtaaaggagcaaagggtggtatcatggcagtctttctaatgggttgttacgacgatgaatccggtaaatggaagacggttaccaagtgttcaggacacgatgataatacgttaagggagttgcaagaccaattaaagatgattaaaattaacaaggatcccaaaaaaattccagagtggttagtagttaataaaatctatattcccgattttgtagtagaggatccgaaacaatctcagatatgggaaatttcaggagcagagtttacatcttccaagtcccataccgcaaatggaatatccattagatttcctagatttactaggataagagaggataaaacgtggaaagaatctactcatctaaacgatttagtaaacttgactaaatcttaatagttacatacaaactgaaaattaaaataacactatttagttggtggtcgccatggatggtgttattgtatactgtctaaacgcgctagtaaaacatggcgaggaaataaatcatataaaaaatgatttcatgattaaaccatgttgtgaaagagtttgtgaaaaagtcaagaacgttcacattggcggacaatctaaaaacaatacagtgattgcagatttgccatatatggataatgcggtatccgatgtatgcaattcactgtataaaaagaatgtatcaagaatatccagatttgctaatttgataaagatagatgacgatgacaagactcctactggtgtatataattattttaaacctaaagatgccattcctgttatcatatctataggaaaggataaagatgtctgtgaactattaatctcatcagacatatcgtgtgcatgcgtggagttaaattcatatcacgtagccattcttcccatggatgtttccttttttaccaaaggaaatgcatcattgattattctcctgtttgatttctctatcgatgcggcacctctcttaagaagtgtaaccgataataatgttattatatctagacaccagcgtctacatgacgagcttccgagttccaattggttcaagttttacataagtataaagtccgactattgttctatattatatatggttgttgatggatctgtgatgcatgcgatagctgataatagaactcacgcaattattagcaaaaatatattagacaatactacgattaacgatgagtgtagatgctgttattttgaaccacagattaggattcttgatagagatgagatgctcaatggatcatcgtgtgatatgaacagacattgtattatgatgaatttacctgatgtaggcgaatttggatctagtatgttggggaaatatgaacctgacatgattaagattgctctttcggtggctggtaatttaataagaaatcgagactacattcccgggagacgaggatatagctactacgtttacggtatagcctctagataatttttttaagcacgaaataaaaaacataattttaaaccaatctatttcatactattttgtgtgatcaccatggacataaagatagatattagtatttctggtgataaatttacggtgactactaggagggaaaatgaagaaagaaaaaaatatctacctctccaaaaagaaaaaactactgatgttatcaaacctgattatcttgagtacgatgacttgttagatagagatgagatgtttactattctagaggaatattttatgtacagaggtctattaggcctcagaataaaatatggacgactctttaacgaaattaaaaaattcgacaatgatgcggaagaacaattcggtactatagaagaactcaagcagaaacttagattaaattctgaagagggagcagataactttatagattatataaaggtacaaaaacaggatatcgtcaaacttactgtatacgattgcatatctatgataggattgtgtgcatgcgtggtagatgtttggagaaatgagaaactgttttctagatggaaatattgtttacgagcgattaaactgtttattgatgatcacatgcttgataagataaaatctatactgcagaatagactagtatatgtggaaatgtcatagaaagttaaaagttaatgagagcaaaaatatataaggttgtattccatatttgttatttttttctgtaatagttagaaaaatacattcgatggtctatctatcagattattatgtgttataaggtactttttctcataataaactagagtatgagtaagatagtgtttttcaaaacatataaatctaaaattgatggatgagatatacagctattaatttcgaaaatatattttaatctgataactttaaacatggatttttaatggtggtttaacgttttaaaaaaagattttgttattgtagtatatgataatattaaaagatggatataaagaatttgctgactgcatgtactattttttacattactacattggctacggcagatatacctacttcgtcactgccacacgctccggtaaacggggcatgtgacgagggagaatatcttgataagaggcataatcaatgttgtaatcagtgtccacctggagaatttgccaaggttagatgtaatggtaacgataacacaaaatgtgaacgctgcccacctcatacatataccgcaatccccaattactctaatggatgtcatcaatgtagaaaatgcccaacaggatcatttgataaggtaaagtgtaccggaacacagaacagtaaatgttcgtgtcttcctggttggtattgcgctactgattcttcacagactgaagattgtcgagattgtataccaaaaaggagatgtccatgcggatactttggtggaatagatgaacaaggaaatcctatttgtaaatcgtgttgtgttggtgaatattgcgactacctacgtaattatagacttgatccatttcctccatgcaaactatctaaatgtaattaattatgattttgatgataatgttaccatacattatatcgctacttggttagtgtattattcagtatgaagacctattaataattacttatcttttgacgatcttgttataattataatataaaaatacttatggcatagtaactcataattgctgacgcgataaattcgtaataatctgttttgttcaaatttttataaggaatctacaggcataaaaataaaaatataatttataatatactcttacagcgcgccatcatgaataacagcagtgaattgattgctgttattaatggatttagaaatagtggacgattttgtgatattaatatagttattaatgatgaaaggataaacgctcacagactcatcctatctggagcctccgaatatttttccattctgttttccaataattttatcgattctaatgaatacgaagttaatctaagtcatttagattatcaaagtgttaacgatttgatcgattacatttatgggatacctttgagcctaactaacgataacgtgaaatatattctttcaaccgctgattttttacaaattggatctgctattacggagtgtgaaaattacatacttaaaaatctttgttctagaaactgtatcgatttctacatatacgctgataaatataataacaagaaaatagaatcagcgtcgtttaacacaatattacaaaatattttgagactcatcaacgatgaaaactttaaatacttaacagaggaatcaatgataaaaattttaagcgatgatatgttaaatataaaaaatgaggatttcgccccactaattctcattaaatggttagagagtactcaacaaccatgcaccgtcgagttacttaaatgcctcagaatatcattgctttccccacaagttataaaatcactttatagtcatcgactggttagttcaatctacgaatgtataacattcttaaacaatatagcattcttggatgaatcatttcctagataccatagcatcgagttgatatctatcggtataagtaattcgcatgataagatttccataaactgctacaatcataaaaaaaatacatgggaaatgatatcttcacgtagatataggtgtagtttcgcagtggccgtcctggataatattatctatatgatgggtggatatgatcagtccccgtatagaagttcaaaggttatagcgtacaatacatgtacaaattcttggatatatgatataccagagctaaaatatcctcgttctaattgtgggggactggctgatgacgaatacatttattgtataggcggcatacgcgatcaggattcatcgttgacatctagtattgatagatggaagccatcaaaaccatattggcagaagtatgctaaaatgcgcgaaccaaaatgtgatatgggggttgcgatgttaaacggattaatatatgttataggtggaatcgttaaaggtgacacgtgtaccgacgcactagagagtttatcagaagatggatggatgaagcatcaacgtcttccaataaaaatgtccaatatgtcgacgattgttcatgatggcaagatttatatatctggaggttacaacaatagtagtgtagttaatgtaatatcgaatctagtccttagctataattcgatatatgatgaatggaccaaattatcatcattaaacattcctagaattaatcccgctctatggtcagcgcataataaattatatgtaggaggaggaatatctgatgatgttcgaactaatacatctgaaacatacgacaaagaaaaagattgttggacattggataatggtcacgtgttaccacgcaattatataatgtataaatgcgaaccgattaaacataaatatccattggaaaaaacacagtacacgaatgattttctaaagtatttggaaagttttataggtagttgatagaacaaaatacataattttgtaaaaataaatcactttttatactaatatgacacgattaccaatacttttgttactaatatcattagtatacgctacaccttttcctcagacatctaaaaaaataggtgatgatgcaactctatcatgtaatcgaaataatacaaatgactacgttgttatgagtgcttggtataaggagcccaattccattattcttttagctgctaaaagcgacgtcttgtattttgataattataccaaggataaaatatcttacgactctccatacgatgatctagttacaactatcacaattaaatcattgactgctagagatgccggtacttatgtatgtgcattctttatgacatcgcctacaaatgacactgataaagtagattatgaagaatactccacagagttgattgtaaatacagatagtgaatcgactatagacataatactatctggatctacacattcaccggaaactagttctgagaaacctgattatatagataattctaattgctcgtcggtattcgaaatcgcgactccggaaccaattactgataatgtagaagatcatacagacaccgtcacatacactagtgatagcattaatacagtaagtgcatcatctggagaatccacaacagacgagactccggaaccaattactgataaagaagaagatcatacagttacagacactgtctcatacactacagtaagtacatcatctggaattgtcactactaaatcaaccaccgatgatacgtacaatgataatgatacagtaccaccaactactgtaggcggtagtacaacctctattagcaattataaaaccaaggactttgtagaaatatttggtattaccgcattaattatattgtcggccgtggcaatattctgtattacgtattatatatgtaataaacgttcacgtaaatacaaaacagagaacaaagtctagatttttgacttacataaatgtctgggatagtaaaatctatcatattgagcgggccatctggtttaggaaagacagccatagccaaaagactatgggaatatatttggatttgtggtgtcccataccactagatttcctcgtcctatggaacgagaaggtgtcgattaccattacgttaacagagaggccatctggaagggaatagccgccggaaactttctagaacatactgagtttttaggaaatatttacggaacttctaaaactgctgtgaatacagcggctattaataatcgtatttgtgtgatggatctaaacatcgatggcgttagaagtcttaaaaatacgtacctaatgccttactcggtgtatataagacctacctctcttaaaatggttgagaccaagcttcgttgtagaaacactgaagcggatgatgagattcatcgtcgtgtgatgttggcaaaaactgacatggatgaggcaggtgaagccggtctattcgacactattatcattgaagatgatgtgaatttagcatatagtaagttaattcagatactacaggaccgtattagaatgtattttaacactaattagagacttaagacttaaaacttgataattaataatataactcgtttttatatgtgtctatttcaacgtctaatgtattagttaaatattaaaacttaccacgtaaaacttaaaatttaaaatgatatttcattgacagatagatcacacattatgaactttcaaggacttgtgttaactgacaattgcaaaaatcaatgggtcgttggaccattaataggaaaaggtggattcggtagtatttatactactaatgacaataattatgtagtaaaaatagagcccaaagctaacggatcattatttaccgaacaggcattttatactagagtacttaaaccatccgttatcgaagaatggaaaaaatctcacaatataaagcacgtaggtcttatcacgtgcaaggcatttggtctatacaaatccattaatgtggaatatcgattcttggtaattaatagattaggtgcagatctagatgcggtgatcagagccaataataatagactaccaaaaaggtcggtgatgttgatcggaatcgaaatcttaaataccatacaatttatgcacgagcaaggatattctcacggagatattaaagcgagtaatatagtcttagatcaaatagataagaataaattatatctagtggattacggattggtttctaaattcatgtctaatggcgaacatgttccatttataagaaatccaaataaaatggataacggtactctagaatttacacctatagattcgcataaaggatacgttgtatctagacgtggagatctagaaacacttggatattgtatgattagatggttgggaggtatcttaccatggactaagatatctgaaacaaagaattgtgcattagtaagtgccacaaaacagaaatatgttaacaatactgcgactttgttaatgaccagtttgcaatatgcacctagagaattgctgcaatatattaccatggtaaactctttgacatattttgaggaacccaattacgacaagtttcggcacatattaatgcagggtgtatattattaagtgtggtgtttggtcgataaaaattaaaaaataacttaatttattattgatctcgtgtgtacaaccgaaatcatggcgatgttttacgcacacgctctcggtgggtacgacgagaatcttcatgcctttcctggaatatcatcgactgttgccaatgatgtcaggaaatattctgttgtgtcagtttataataacaagtatgacattgtaaaagacaaatatatgtggtgttacagtcaggtgaacaagagatatattggagcactgctgcctatgtttgagtgcaatgaatatctacaaattggaaatccgatccatgatcaagaaggaaatcaaatctctatcatcacatatcgccacaaaaactactatgctctaagcggaatcgggtacgagagtctagacttgtgtttggaaggagtagggattcatcatcacgtacttgaaacaggaaacgctgtatatggaaaagttcaacatgattattctactatcaaagagaaggccaaagaaatgagtgcacttagtccaggacctatcatcgattaccacgtctggataggagattgtatctgtcaagttactgctgtggacgtacatggaaaggaaattatgaaaatgagattcaaaaagggtgcggtgcttccgatcccaaatctggtaaaagttaaacttggggagaatgatacagaaaatctttcttctactatatcggcggcaccatcgaggtaaccacctctctggaagacagcgtgaatcatgtactcatgaaacgtttggaaactatacgccatatgtggtctgttgtatatgatcattttgatattgtgaatggtaaagaatgctgttatgtgcatacgcattcatctaatcaaaatcctataccgagtactgtaaaaacaaatttgtacatgaagactatgggatcatgcattcaaatggattccatggaagctctagagtatcttagcgaactgaaggaatcaggtggatggagtcccagaccagaaatgcaggaatttgaatatccagatggagtggaagacactgaatcaattgagagattggcagaggagttcttcaatagatcagaacttcaggctggtgaatcagtcaaatttggtaattctattaattgttaaacatacatctgtttcagctaagcaactaagaacacgtatacggcagcagcttccttctatactctcatcttttaccaacacaaagggtggatatttgttcattggagttgataataatacacacaaagtatttggattcacggtgggttacgactacctcagactgatagagaatgatatagaaaagcatatcaaaagacttcgtgttgtgcatttctgtgagaagaaagaggacatcaagtacgcgtgtcgattcatcaaggtatataaacctggggatgagactacctcgacatacgtgtgcgctatcaaagtggaaagatgctgttgtgctgtgtttgcagattggccagaatcatggtatatggatactaatggtatcaagaagtattctccagatgaatgggtgtcacatataaaattttaattaatgtaactatagagaacaaataataaggttgtaatatcatatagacaataactaacaattaattagtaactgttatctcttttttaactaaccaactaactatatacctattaatacatcgtaattatagttcttaacatctattaatcattaattcgcttctttaattttttataaactaacattgttaattgaaaagggataacatgttacagaatataaattatatatggatttttttaaaaaggaaatacttgactggagtatatatttatctcttcattatatagcacgcgtgttttccaatttttccacatcccatataatacaggattataatctcgttcgaacatacgagaaagtggataaaacaatagttgattttttatctaggttgccaaatttattccatattttagaatatggggaaaatattctacatatttattctatggatgatgctaatacgaatattataattttttttctagatagagtattaaatattaataagaacgggtcatttatacacaatctcgggttatcatcatccattaatataaaagaatatgtatatcaattagttaataatgatcatccagataataggataagactaatgcttgaaaatggacgtagaacaagacattttttgtcctatatatcagatacagttaatatctatatatgtattttaataaatcatggattttatatagatgccgaagacagttacggttgtacattattacatagatgtatatatcactataagaaatcagaatcagaatcatacaatgaattaattaagatattgttaaataatggatcagatgtagataaaaaagatacgtacggaaacacaccttttatcctattatgtaaacacgatatcaacaacgtggaattgtttgagatatgtttagagaatgctaatatagactctgtagactttaatagatatacacctcttcattatgtctcatgtcgtaataaatatgattttgtaaagttattaatttctaaaggagcaaatgttaatgcgcgtaataaattcggaactactccattttattgtggaattatacacggtatctcgcttataaaactatatttggaatcagacacagagttagaaatagataatgaacatatagttcgtcatttaataatttttgatgctgttgaatctttagattatctattatccagaggagttattgatattaactatcgtactatatacaacgaaacatctatttacgacgctgtcagttataatgcgtataatacgttggtctatctattaaacaaaaatggtgattttgagacgattactactagtggatgtacatgtatttcggaagcagtcgcaaacaacaacaaaataataatggaagtactattgtctaaacgaccatctttgaaaattatgatacagtctatgatagcaattactaaacataaacagcataatgcagatttattgaaaatgtgtataaaatatactgcgtgtatgaccgattatgatactcttatagatgtacagtcgctacagcaatataaatggtatattttaagatgtttcgatgaaatagatatcatgaagagatgttatataaaaaataaaactgtattccaattagttttttgtatcaaagacattaatactttaatgagatacggtaaacatccttctttcgtgaaatgcactagtctcgacgtatacggaagtcgtgtacgtaatatcatagcatctattagatatcgtcagagattaattagtctattatccaagaagctggatcctggagataaatggtcgtgttttcctaacgaaataaaatataaaatattggaaaactttaacgataacgaactatccacatatctaaaaatcttataaacattattaaaatataaaatctaagtaggataaaatcacactacatcattgtttccttttagtgctcgacagtgtatactatttttaacgctcataaataaaaatgaaaacgatttccgttgttacgttgttatgcgtactacctgctgttgtttattcaacatgtactgtacccactatgaataacgctaaattaacgtctaccgaaacatcgtttaatgataaccagaaagttacgtttacatgtgatcagggatatcattctttggatccaaatgctgtctgtgaaacagataaatggaaatacgaaaatccatgcaaaaaaatgtgcacagtttctgattatgtctctgaactatataataaaccgctatacgaagtgaattccaccatgacactaagttgcaacggcgaaacaaaatattttcgttgcgaagaaaaaaatggaaatacttcttggaatgatactgttacgtgtcctaatgcggaatgtcaacctcttcaattagaacacggatcgtgtcaaccagttaaagaaaaatactcatttggggaatatatgactatcaactgtgatgttggatatgaggttattggtgcttcgtacataagttgtacagctaattcttggaatgttattccatcatgtcaacaaaaatgtgatatgccgtctctatctaacggattaatttccggatctacattttctatcggtggcgttatacatcttagttgtaaaagtggttttacactaacggggtctccatcatccacatgtatcgacggtaaatggaatcccatactcccaatatgtgtacgaactaacgaaaaatttgatccagtggatgatggtcccgacgatgagacagatttgagcaaactctcgaaagacgttgtacaatatgaacaagaaatagaatcgttagaagcaacttatcatataatcatagtggcgttgacaattatgggcgtcatatttttaatctccgttatagtattagtttgttcctgtgacaaaaataatgaccaatataagttccataaattgctaccgtaaatataaatccgttaaaataattaataatttaataacaaacaagtatcaaaagattaaagacttatagctagaatcaattgagatgtcttcttcagtggatgttgatatctacgatgccgttagagcatttttactcaggcactattataacaagagatttattgtgtatggaagaagtaacgccatattacataatatatacaggctatttacaagatgcgccgttataccgttcgatgatatagtacgtactatgccaaatgaatcacgtgttaaacaatgggtgatggatacacttaatggtataatgatgaatgaacgcgatgtttctgtaagcgttggcaccggaatactattcatggaaatgtttttcgattacaataaaaatagtatcaacaatcaactaatgtatgatataattaatagcgtatctataattctagctaatgagagatatagaagcgcttttaacgacgatggtatatacatccgtagaaatatgattaacaagttgtacggatacgcatctctaactactattggcacgatcgctggaggtgtttgttattatctgttgatgcatctagttagtttgtataaataattatttcaatatactagttaaaattttaagattttaaatgtataaaaaactaataacgtttttatttgtaataggtgcattagcatcctattcgaataatgagtacactccgtttaataaactgagtgtaaaactctatatagatggagtagataatatagaaaattcatatactgatgataataatgaattggtgttaaattttaaagagtacacaatttctattattacagagtcatgcgacgtcggatttgattccatagatatagatgttataaacgactataaaattattgatatgtataccattgactcgtctactattcaacgcagaggtcacacgtgtagaatatctaccaaattatcatgccattatgataagtacccttatattcacaaatatgatggtgatgagcgacaatattctattactgcagagggaaaatgctataaaggaataaaatatgaaataagtatgatcaacgatgatactctattgagaaaacatactcttaaaattggatctacttatatatttgatcgtcatggacatagtaatacatattattcaaaatatgatttttaaaaatttaaaatatattatcacttcagtgacagtagtcaaataacaaacaacaccatgagatatattataattctcgcagttttgttcattaatagtatacatgctaaaataactagttataagtttgaatccgtcaattttgattccaaaattgaatggactggggatggtctatacaatatatcccttaaaaattatggcatcaagacgtggcaaacaatgtatacaaatgtaccagaaggaacatacgacatatccgcatttccaaagaatgatttcgtatctttctgggttaaatttgaacaaggcgattataaagtggaagagtattgtacgggactatgcgtcgaagtaaaaattggaccaccgactgtaacattgactgaatacgacgaccatatcaatttgtacatcgagcatccgtatgctactagaggtagcaaaaagattcctatttacaaacgcggtgacatgtgtgatatctacttgttgtatacggctaacttcacattcggagattctaaagaaccagtaccatatgatatcgatgactacgattgcacgtctacaggttgcagcatagactttgtcacaacagaaaaagtgtgcgtgacagcacagggagccacagaagggtttctcgaaaaaattactccatggagttcgaaagtatgtctgacacctaaaaagagtgtatatacatgcgcaattagatccaaagaagatgttcccaatttcaaggacaaaatggccagagttatcaagagaaaatttaatacacagtctcaatcttatttaactaaatttctcggtagcacatcaaatgatgttaccacttttcttagcatgcttaacttgactaaatattcataactaatttttattaatgatacaaaaacgaaataaaactgcatattatacactggttaacgcccttataggctctaaccattttcaagatgaggtccctgattatagtccttctgttcccctctatcatctactccatgtctattagacgatgtgagaagactgaagaggaaacatggggattgaaaatagggttgtgtataattgccaaagatttctatcccgaaagaactgattgcagtgttcatctcccaactgcaagtgaaggattgataactgaaggcaatggattcagggatatacgaaacaccgataaattataaaaaaagcaatgtgtccgctgtttccgttaataatactattttcgtaactggcggattattcataaataactctaatagcacgatcgtggttaacaatatggaaaaacttgacatttataaagacaaacaatggtcgattatagaaatgcctatggctagggtatatcacggcattgactcgacatttggaatgttatattttgccggaggtctatccgttaccgaacaatatggtaatttagagaaaaacaacgagatatcttgttacaatcctagaacgaataagtggtttgatatttcatatactatttataagatatccatatcatcattgtgtaaactaaataacgtcttctatgtatttagtaaggacattggatatgtggaaaagtatgatggtgcatggaagttagtacatgatcgtctccccgctataaaggcattatcaacttctccttattgattgaaaatgaaaatataaatagtttttatgtatagcagtattaccctatagttttattgcttactactaacatggatacagatgttacaaatgtagaagatatcataaatgaaatagatagagagaaagaagaaatactaaaaaatgtagaaattgaaaataataaaaacattaacaagaatcatcccaatgaatatattagagaagcactcgttattaataccagtagtaatagtgattccattgataaagaagttatagaatgtatcagtcacgatgtaggaatatagatcatatctactaatttttataatcgatacaaaacataaaaaacaactcgttattacatagcaggcatggaatccttcaagtattgttttgataacgatggcaagaaatggattatcggaaatactttatattctggtaattcaatactctataaggtcagaaaaaatttcactagttcgttctacaattacgtaatgaagatagatcacaaatcacacaagccattgttgtctgaaatacgattctatatatctgtattggatcctttgactatcgacaactggacacgggaacgtggtataaagtatttggctattccagatctgtatggaattggagaaaccgatgattatatgttcttcgttataaagaattcgggaagagtattcgccccaaaggatactgaatcagtcttcgaagcatgcgtcactatgataaacacgttagagtttatacactctcgaggatttacccatggaaaaatagaaccgaggaatatactgattagaaataaacgtctttcactaattgactattctagaactaacaaactatacaagagtggaaactcacatatagattacaacgaggacatgataacttcaggaaatatcaattatatgtgtgtagacaatcatcttggagcaacagtttcaagacgaggagatttagaaatgttgggatattgcatgatagaatggttcggtggcaaacttccatggaaaaacgaaagtagtataaaagtaataaaacaaaaaaaagaatataaaaaatttatagctactttctttgaggactgttttcctgaaggaaatgaacctctggaattagttagatatatagaattagtatacacgttagattattctcaaactcctaattatgacagactacgtaaactgtttatacaagattgaaattatattcttttttttatagagtgtggtagtgttacggatatctaatattaatattagactatctctatcgcgctacacgaccaatatcgattactatggatatcttctatgaaaggagagaatgtatttatttctccagcgtcaatctcgtcagtattgacaatactgtattatggagctaatggatccactgctgaacagctatcaaaatatgtagaaacggaggagaacacggataaggttagcgctcagaatatctcattcaaatccatgaataaagtatatgggcgatattctgccgtgtttaaagattcctttttgagaaaaattggcgataagtttcaaactgttgacttcactgattgtcgcactatagatgcaatcaacaagtgtgtagatatctttactgaggggaaaatcaatccactattggatgaaccattgtctcctagcaattagtgccgtatactttaaagcaaaatggttgacgccattcgaaaaggaatttaccagtgattatcccttttacgtatctccgacggaaatggtagacgtaagtatgatgtctatgtacggcaaggcatttaatcacgcatctgtaaaagaatcattcggcaacttttcaatcatagaactgccatatgttggagatactagtatgatggtcattcttccagacaagattgatggattagaatccatagaacaaaatctaacagatacaaattttaagaaatggtgtgactttatggatgctatgtttatagatgttcacattcccaagtttaaggtaacaggctcgtataatctggtggatactctagtaaagtcaggactgacagaggtgttcggttcaactggagattatagcaatatgtgtaatttagatgtgagtgtcgacgctatgatccacaaaacgtatatagatgtcaatgaagagtatacagaagcagctgcagcaacttctgtactagtggcagactgtgcatcaacaattacaaatgagttctgtgcagatcatccgttcatctatgtgattaggcatgttgatggaaaaattcttttcgttggtagatattgctctccgacaactaattgttaaccattttttttaaaaaaaatagaaaaaacatgtggtattagtgcaggtcgttgttcttccaattgcaattggtaagatgacggccaactttagtacccacgtcttttcaccacagcactgtggatgtgacagactgaccagtattgatgacgtcaaacaatgtttgactgaatatatttattggtcgtcctatgcataccgcaacaggcaatgcgctggacaattgtattccacactcctctcttttagagatgatgcggaattagtgttcatcgacattcgcgagctggtaaaaaatatgccgtgggatgatgtcaaagattgtacagaaatcatccgttgttatataccggatgagcaaaaaaccatcagagagatttcggccatcatcggactttgtgcatatgctgctacttactggggaggtgaagaccatcccactagtaacagtctgaacgcattgtttgtgatgcttgagatgctaaattacgtggattataacatcatattccggcgtatgaattgatgagttgtacatcttgacattttctttcttctcttctccctttcttctcttctcccttcctccctcttctccctttcccagaaacaaacttttttacccactataaaataaaatgagtatactacctattatatttcttcctatatttttttattcttcattcgttcagacttttaacgcgtctgaatgtatcgacaaagggcaatattttgcatcattcatggagttagaaaacgagccagtaatcttaccatgtcctcaaataaatacgctatcatccggatataatatattagatattttatgggaaaaacgaggagcggataatgatagaattataccgatagataatggtagcaatatgctaattctgaacccgacacaatcagactctggtatttatatatgcattaccacgaacgaaacctactgtgacatgatgtcgttaaatttgacaatcgtgtctgtctcagaatcaaatatagatcttatctcgtatccacaaatagtaaatgagagatctactggcgaaatggtatgtcccaatattaatgcatttattgctagtaacgtaaacgcagatattatatggagcggacatcgacgccttagaaataagagacttaaacaacggacacctggaattattaccatagaagatgttagaaaaaatgatgctggttattatacatgtgttttagaatatatatacggtggcaaaacatataacgtaaccagaattgtaaaattagaggtacgggatagaataataccttctactatgcaattaccagatggcattgtaacttcaataggtagtaatttgactattgcatgcagagtatcgttgagacctcccacaacggacaccgacgtcttttggataagtaatggtatgtattacgaagaagatgatggggacggaaacggtagaataagtgtagcaaataaaatctatatgaccgataagagacgtgttattacatcccggttaaacattaatcctgtcaaggaagaagatgctacaacgtttacgtgtatggcgtttactattcctagcatcagcaaaacagttactgttagtataacgtgaatgtatgttgttacatttccatgtcaattgagtttataagaatttttatacattatcttccaacaaacaattgacgaacgtattgctatgattaactcccacgatactatgcatattattaatcattaacttgcagactatacctagtgctattttgacatactcgtgttcttgtgtaattgcggtatctatattattaaagtacgtaaatctagctatagttttattatttaattttagataatataccgtctccttatttttaaaaattgccacatcctttattaaatcatgaatgggaatttctatgtcatcgttagtatattgtgaacaacaagagcagatatctataggaaagggtggaatgcgatacattgatctatgtagttttaaaacacacgcgaactttgaagaatttatataaatcattccatcgatacatccttctatgttgacatgtatatatccaggaattcttttattaatgtcaggaaatgtataaactaaaacattgcccgaaagcggtgcctctatctgcgttatatccgttcttaacttacaaaatgtaaccaatacctttgcatgacttgttttgttcggcaacgttagtttaaacttgacgaatggattaattacaatagcatgatccgcgcatctattaagtttttttactttaacgcccttgtatgtttttacagagactttatctaaatttctagtgcttgtatgtgttataaatataacgggatatagaaccgaatcacctaccttagatacccaattacattttatcagatccagataataaacaaattttgtcgccctaactaattctatattgttatatattttacaattggttatgatatcatgtaataacttggagtctaacgcgcatcgtcgtacgtttatacaattgtgatttagtgtagtatatctacacatgtatttttccgcactatagtattctggactagtgataaaactatcgttatatctgtcttcaatgaactcatcgagatattgctctctgtcatattcatacacctgcataaactttctagacatcttacaatccgtgttattttaggatcatatttacatatttacgggtatatcaaagatgttagattagttaatgggaatcgtctataataatgaatattaaacaattatatgaggacttttaccacaaagcatcataaaaatgagtcgtcgtctgatttatgttttaaatatcaaccgcaaatcaactcataaaatacaagagaatgaaatatatacatattttagtcattgcaatatagaccatacttctacagaacttgattttgtagttaaaaactatgatctaaacagacgacaacctgtaactgggtatactgcactacactgctatttgtataataattactttacaaacgatgtactgaagatattattaaatcatgacgtaaatgtaacgatgaaaaccagtagcggacgtatgcctgtttatatattgcttactagatgttgtaatatttcacatgatgtagtgatagatatgatagacaaagataaaaaccacttattacatagagactattccaacctattactagagtatataaaatctcgttacatgttattgaaggaagaggatatcgatgagaacatagtatccactttattagataagggaatcgatcctaactttaaacaagacggatatacagcgttacattattattatttgtgtctcgcacacgtttataaactaggtgagtgtagaaaaccgataacgataaaaaaggccaagcgaattatttctttgtttatacaacatggagctaatctaaacgcgttagataattgtggtaatacaccattccatttgtatcttagtattgaaatgtgtaataatattcatatgactaaaatgctgttgacttttaatccgaatttcaaaatatgtaataatcatggattaacgcctatactatgttatataacttccgactacatacaacacgatattcttgttatgttaatacatcactatgaaacaaatgttggagaaatgccgatagatgagcgtcgtatgatcgtattcgagtttatcaaaacatattctacacgtccggcagattcgataacttatttgatgaataggtttaaaaatataaatatttatacccgctatgaaggaaagacattattacacgtagcatgtgaatataataatacacaagtaatagattatcttatacgtatcaacggagatataaatgcgttaaccgacaataacaaacacgctacacaactcattatagataacaaagaaaattccccatataccattaattgtttactgtatatacttagatatattgtagataagaatgtgataagatcgttggtggatcaacttccatctctacctatcttcgatataaaatcatttgagaaattcatatcctactgtatacttttagatgacacattttacgataggcacgttaagaatcgcgattctaaaacgtatcgatacgcattttcaaaatacatgtcgtttgataaatacgatggtataataactaaatgtcacgacgaaacaatgttactcaaactgtccactgttctagacactacactatatgcagttttaagatgtcataattcgagaaagttaagaagatacctcaacgagttaaaaaaatataataacgataagtcctttaaaatatattctaatattatgaatgagagataccttaatgtatattataaagatatgtacgtgtcaaaggtatatgataaactatttcctgttttcacagataaaaattgtctactaacattactaccttcagaaattatatacgaaatattatacatgctgacaattaacgatctttataatatatcgtatccacctaccaaagtatagttgtatttttctcatgcgatgtgtgtaaaaaaactgatattatataaatattttagtgccgtataataaagatgacgatgaaaatgatggtacatatatatttcgtatcattattgttattgctattccacagttacgccatagacatcgaaaatgaaatcacagaattcttcaataaaatgagagatactctaccagctaaagactctaaatggttgaatccagcatgtatgttcggaggcacaatgaatgatatagccgctctaggagagccattcagcgcaaagtgtcctcctattgaagacagtcttttatcgcacagatataaagactatgtggttaaatgggagaggctagaaaagaatagacggcgacaggtttctaataaacgtgttaaacatggtgatttatggatagccaactatacatctaaattcagtaaccgtaggtatttgtgcaccgtaactacaaagaatggtgactgtgttcagggtatagttagatctcatattaaaaaacctccttcatgcattccaaaaacatatgaactaggtactcatgataagtatggcatagacttatactgtggaattctttacgcaaaacattataataatataacttggtataaagataataaggaaattaatatcgacgacattaagtattcacaaacgggaaaggaattaattattcataatccagagttagaagatagcggaagatacgactgttacgttcattacgacgacgttagaatcaagaatgatatcgtagtatcaagatgtaaaatacttacggttataccgtcacaagaccacaggtttaaactaatactagatccgaaaatcaacgtaacgataggagaacctgccaatataacatgcactgctgtgtcaacgtcattattgatcgacgatgtactgattgaatgggaaaatccatccggatggcttataggattcgattttgatgtatactctgttttaactagtagaggcggtatcaccgaggcgaccttgtactttgaaaatgttactgaagaatatataggtaatacatataaatgtcgtggacacaactattattttgaaaaaacccttacaactacagtagtattggagtaaatatacaatgcatttttatatacattactgaattattattactgaattattattactgaattattattaattatatcgtatttgtgctatagaatggatgaagatacgcgactatctaggtatttgtatctcaccgatagagaacatataaatgtagactctattaaacagttgtgtaaaatatcagatcctaatgcatgttatagatgtggatgtacggctttacatgagtacttttataattatagatcagtcaacggaaaatacaagtatagatacaacggttactatcaatattattcatctagcgattatgaaaattataatgaatattattatgatagaactggtatgaacagtgagagtgataatatatcaatcaaaacagaatatgaattctatgatgaaacacaagatcaaagtacacaactagtaggttacgacattaaactcaaaaccaatgaggatgattttatggctatgatagatcagtgggtgtccatgattatatagatgaatcaattaataaagtagtatatggaagagagtctcacgtaagatggcgggatatatggcaagaacataatgatggcgtatacagtataggaaaggagtgcatagataatatatacgaagacaaccataccgtagacgaattctacaagatagacagcgtatcagatgtagatgacgcggaacacatatctccgataactaaaaaaccatagaatcagttgatgataatacctacatttctaatcttccgtataccatcaaatacaaaatattcgagcaacaataagtattttttatacctttaaaactgataaataaattttttctagtgatattttggcaagatgagaatcctatttctcatcgctttcatgtatgggtgtgttcactcatatgttaacgcggttgaaaccaaatgtccaaatctagacattgtaacatcttctggagaatttcattgttcaggatgtgtggaacatatgcctgagtttagctatatgtattggttggcaaaggatatgaaatcggacgaggataccaagtttatagaacatctgggtgatggcatcaaagaagatgaaaccgttcgtaccacagatagtggaatcgtcactctacgtaaagtccttcatgtgactgatactaataaatttgataattataggttcacttgtgtcctcgctacgctagatggcatttataaaaagaatgtttgctgaagtagttgtgtgctactatttttatttatgatataatctaatggaattaatttgaattgatatttatccaatactaaagattatattagaatcaaattaatcttttatacgagaaaaaataacgacatacgtcgtcaacaaattaaactttttatttattagttaactagcttatagaacttgctcattgttatgtttctaaaacgggtacggcatataggacaattatccgacgcaccggtttctcttcgtgttctatgccatatattgatgcatgttatgcaaaatatatgagtacacgaatccaataaaccaaagtatctatcgttttgagtaaacaacttcatagcaaattccacattctttttctttacttactctatacacgtcctcgtatttatttagtattttgatgatatccaactcagaaatggttgttgtattattgggtgtatttggagtataggtattattagctatgtaccaatttaccaaccctcttaatattgattgataatcacatcggttatccaattaataactaaattgtagtgtatatatagaccatatatgtttctatttttttgacagttacgtatagtttcagtaagttttgattgttgtattcctgtatctctagataagttagtcatatagtcccttccggcgatacgttttttccaagcccgaaattgattagccaaatgtgtatttatttttgtgatattgatataatatttcggataatgcatactgttagtcttatatcatttggttcatctatgtattgtaatattgttacatgatctatagatgatgtattgattttggcaggatcgaattccatatccgcgactaaacagtgaaaaaaatgtaaatactttttaaattttaaattagtaaaacttttttttattttttatgattccaaaaatactgaatacaaagtcctaaattataaatatggagatcatactaccacaacttattattatgtatacaaggccggtgtaatagatagatatatataattctattacaccggcagacaattaccgaccggtatttgtcgttaccaacataccgtataatatgtaatatacaattccataacccattgacagttgttatacatcaaaattgcaattcttttgattacgatgttataagaatgtagttaattgatgtatgatgttaatgtgtcctctttcctcttataacatcgtaatcaaaaacttttttataatatatacctaataatgtgtcttaatagttctcgtgattcgtcaaacaatcattcttataaaatataataaagcaacgtaaaaacacataaaaataagcgtaactaataagacaatggatatttacgacgataaaggtctacagactattaaactgtttaataatgaatttgattgtataaggaatgacatcagagaattatttaaacatgtaactgattccgatagtatacaacttccgatggaagacaattctgatattatagaaaatatcagaaaaatactatatagacgattaaaaaatgtagaatgtgttgacatcgataacacaataacttttatgaaatacgatccaaatgatgataataagcgtacgtgttctaattgggtacccttaactaataactatatggaatattgtctagtaatatatttggaaacaccgatatgtggaggcaaaataaaattataccaccctacaggaaatataaagtcggataaggatattatgtttgcaaagactctagactttaaatcaacgaaagtgttaactggacgtaaaacaattgccgttctagacatatccgtttcatataatagatcaatgactactattcactacaacgacgacgttgatatagatatacatactgataaaaatggaaaagagttatgttattgttatataacaatagatgatcattacttggttgatgtggaaactataggagttatagtcaatagatctggaaaatgtctgttagtaaataaccatctaggtataggtatcgttaaagataaacgtataagcgatagttttggagatgtatgtatggatacaatatttgacttttctgaagcacgagagttattttcattaactaatgatgataacaggaatatagcatgggacactgataaactagacgatgatacagatatatggactcccgtcacagaagatgattacaaatttctttctagactagtattgtatgcaaaatctcaatcggatactgtatttgactattatgttcttactggtgatacggaaccacccactgtattcattttcaaggtaactagattttactttaatatgccgaaataaaaaatttttgtataatatctagaggtagaggtattgtttagataaatacaaataacatagatacatcgcatacttagcatttttataaatatacataagacatacactttatacatttttgtaaaaatactcataaaaaaatttataaaaattatggcacaaccatatcttgtataggtagtttagttcgtcgagtgaacctataaacagataatagacaacacataataatgcctactaatacaagcataataccgggagatgggatatatgacgttgtagtgtttgggttttctgaacgttgatagtctactaatactacatgctgacatctaatgcctgtataaccatgagagcatctacaatacataccgtcaatatctctagcgtggatacagtcaccgtgtaaacaatatccatctccctctggaccgcataatctgatagctggaatatctgttgtagcgtttgtaatttctggcaatgtcgtttcgatagcgttaccactatcggcgaatgatctgattatcatagcagcgaacaacaacatcagataatttatcaacatttttgatggattctgtgtttatgctgtttctcagtgtgtgtttatgacaagattgggaattttatattattaattcagtaatataaactaataatatattgttaattgtgtaaataatataaaaataacaatacaatattgaatgtgttgctgttaaaaatgtatgtgttaatataatagaataaaataaatgagtatgatcattttagataacgattgattttatcattaccgcttcattcttatattctttgcttacggaacctatatttagaaacatctactaacaattttttatgcttgcattattaatggtatgtaatatgattgattgtgtacgcaataccaatttgttaagtatgaatacggggtacaaacataaattgaaatttaacattatttatttatgatatatatcgttatcgttaggtctataccatggatatctttaaagaactaatcttaaaacaccctgatgaaaatgttttgatttctccagtttccattttatctactttatctattctaaatcatggagcagctggttctacagctgaacaactatcaaaatatatagagaatatgaatgagaatacacccgatgacaataatgatgacatggaggtagatattccgtattgtgcgacactagctaccgcaaataaaatatacggtagcgatagtatcgagttccacgcctccttcctacaaaaaataaaagacgattttcaaactgtaaactttaataatgctaaccaaacaaaggaactaatcaacgaatgggttaagacaatgacaaatggtaaaattaattccttattgactagtccgctatccattaatactcgtatgacagttgttagcgccgtccattttaaagcaatgtggaaatatccattttctaaacatcttacatatacagacaagttttatatttctaagaatatagttaccagcgttgatatgatggtgggtaccgagaataacttgcaatatgtacatattaatgaattattcggaggattctctattatcgatattccatacgagggaaactctagtatggtaattatactaccggacgacatagaaggtatatataacatagaaaaaaatataacagatgaaaaatttaaaaaatggtgtggtatgttatctactaaaagtatagacttgtatatgccaaagtttaaagtggaaatgacagaaccgtataatctggtaccgattttagaaaatttaggacttactaatatattcggatattatgcagattttagcaagatgtgtaatgaaactatcactgtagaaaaatttctacatacgacgtttatagatgttaatgaggagtatacagaagcatcggccgttacaggagtatttacgattaacttttcgatggtatatcgtacgaaggtctacataaaccatccattcatgtacatgattaaagacaccacaggacgtatactttttatagggaaatactgctatccgcaataaatataaacaaatagacttttataaagagtcttcaacgataagtatatcgacatactacttatgctgcgaaagattctgaacgagaacgactatctcaccctcttggatcatatccgcactgctaaatactaaatctccactacactttttatcatcttatgaggaatgattgccttcgtgaaataggaataattagcaccagaatagctatggattattgtggtagagagtgcactattctatgtcgtctactggatgaagatgtgacgtacaaaaaaataaaactagaaattgaaacgtgtcacaacttatcaaaacatatagatagacgaggaaacaatgcgctacattgttacgtctccaataaatgcgatacagacattaagattgttctctcgcggagtcgagagactttgtagaaacaacgaaggattaactccgctaggagtatacagtaagcatagatacgtaaaatctcagattgtgcatctactgatatccagctattcaaattcctctaacgaactcaagtcgaatataaatgatttcgatctgtattcggataatatcgacttacgtctgctaaaatacctaattgtggataaacggatacgtccgtccaagaatacgaattatgcaatcaatggtctcggattggtggatatatacgtaacgacgcctaatccgagaccagaagtattgctatggcttcttaaatcagaatgttacagcaccggttacgtatttcgtacctgtatgtacgacagtgatatgtgtaagaactctcttcattactatatatcgtctcatagagaatctcaatctctatccaaggatgtaattaaatgtttgatcgataacaatgtttccatccatggcagagacgaaggaggatctttacccatccaatactactggtctttctcaaccatagatatagagattgttaaattattattaataaaggatgtggacacgtgtagagtatacgacgtcagccctatattagaggcgtattatctaaacaagcgatttagagtaaccccatataatgtagacatggaaatcgttaatcttcttattgagagacgtcatactcttgtcgacgtaatgcgtagtattacttcgtacgattccagagaatataaccactacatcatcgataacattctaaagagatttagacaacaggatgaatccatcgtacaagccatactgataaactacttacattacggcgatatggtcgttcgatgcatgttagataacggacaacaactatcctctacacgactactttgttaataataatctcgtcgatgtaaacgtcgtaaggtttatcgtggaaaatatggacacgcggctgtaaatcacgtatcgaacaatggccgtctatgtatgtacggtctgatattatcgagatttaataattgcgggtatcactgttatgaaaccatactgatagatgtatttgatatactaagcaagtacatggatgatatagatatgatcgataactctactatattacgcggtcgatgtcaataatatacaatttgcaaagcggttattggaatatggagcgagtatcacgctcgataatcaatacggccatccagaaaagcagttacagaagagaaaacaaaacgaaatcgttgttctacaagatgtctctccctacgacgattactacgtaaaaaagatactagcctactgcctattaagggacgagtcattcgcggaactacatagtaaattctgtttaaacgaggactataaaagtgtatttatgaaaaatatatcattcgataagatagattccatcatcgtgacataagtcgcctcaaagagattcgaatctccgacaccgacctgtatacggtatcacagctatcttaaagccatacattcagacagtcacatttcatttcccatgtacgacgatctcatagaacagtgccatctatcgatggagcgtaaaagtaaactcgtcgacaaagcactcaataaattagagtctaccatcggtcaatctagactatcgtatttgcctccggaaattatgcgcaatatcatctaaacagtatgttgtacggaaagaaccattacaaatattatccatgatagaaagaaaatatctatatgattggagaagtaggaaacaggaacaagacaacgattactacattattaaatcatgaagtccgtattatactcgtatatattgtttctctcatgtataataataaacggaagagatatagcaccgcatgcaccatccgatggaaagtgtaaagacaacgaatacaaacgccataatttgtgtccgggaacatacgcttccagattatgcgatagcaagactaacacacgatgtacgccgtgtggttcgggtaccttcacatctcgcaataatcatttacccgcttgtctaagttgtaacggaagacgcgatcgtgtaacacgactcacaatagaatctgtgaatgctctcccggatattattgtcttctcaaaggatcatccggatgcaaggcatgtgtttcccaaacaaaatgtggaataggatacggagtatccggagacgtcatctgttctccgtgtggtctcggaacatattctcacaccgtctcttccgcagataaatgcgaacccgtacccagaaatacgtttaactatatcgatgtggaaattaacctgtatccagttaacgacacgtcgtgtactcggacgaccactaccggtctcagcgaatccatctcaacgtcggaactaactattactatgaatcataaagactgtaatcccgtatttcgtgatggatacttctccgttcttaataaggtagcgacttcaggtttctttacaggagaaaggtgtgcactctgaatttcgagattaaatgcaataacaaagattcttcctccaaacagttaacgaaagcaaagaatgatactatcatgccgcattcggagacagtaactctagtgggcgacatctatatactatatagtaataccaatactcaagactacgaaactgatacaatctcttatcatgtgggtaatgttctcgatgtcgatagccatatgcccggtagttgcgatatacataaactgatcactaattccaaacccacccactttttatagtaagtttttcacccataaataataaatacaataattaatttctcgtaaaagtagaaaatatattctaatttattgcacggtaaggaagtagaatcataaagaacagtactcaatcaatagcaattatgaaacaatatatcgtcctggcatgcatgtgcctggcggcagctgctatgcctgccagtcttcagcaatcatcctcatcctcctcctcgtgtacggaagaagaaaacaaacatcatatgggaatcgatgttattatcaaagtcacaaagcaagaccaaacaccgaccaatgataagatttgccaatccgtaacggaaattacagagtccgagtcagatccagatcccgaggtggaatcagaagatgattccacatcagtcgaggatgtagatcctcctaccacttattactccatcatcggtggaggtctgagaatgaactttggattcaccaaatgtcctcagattaaatccatctcagaatccgctgatggaaacacagtgaatgctagattgtccagcgtgtccccaggacaaggtaaggactctcccgcgatcactcatgaagaagctcttgctatgatcaaagactgtgaagtgtctatcgacatcagatgtagcgaagaagagaaagacagcgacatcaagacccatccagtactcgggtctaacatctctcataagaaagtgagttacgaagatatcatcggttcaacgatcgtcgatacaaaatgcgtcaagaatctagagtttagcgttcgtatcggagacatgtgcaaggaatcatctgaacttgaggtcaaggatggattcaagtatgtcgacggatcggcatctgaaggtgcaaccgatgatacttcactcatcgattcaacaaaactcaaagcgtgtgtctgaatcgataactctattcatctgaaattggatgagtagggttaatcgaacgattcaggcacaccacgaattaaaaaagtgtaccggacactatattccggtttgcaaaacaaaaatgttcttaactacattcacaaaaagttacctctcgcgacttcttctttttctgtctcaatagtgtgatacgattatgacactattcctattcctattcctatttcctttcagagtatcacaaaaatattaaacctctttctgatggtctcataaaaaaagttttacaaaaatatttttattctctttctctctttgatggtctcataaaaaaagttttacaaaaatatttttattctctttctctctttgatggtctcataaaaaaagttttacaaaaatatttttattctctttctctctttgatggtctcataaaaaaagttttacaaaaatatttttattctctttctctctttgatggtctcataaaaaaagttttacaaaaatatttttattctctttctctctttgatggtctcataaaaaaagttttacaaaaatatttttattctctttctctctttgatggtctcataaaaaaagttttacaaaaatatttttattctctttctctctttgatggtctcataaaaaaagttttacaaaaatatttttattctctttctctctttgatggtctcataaaaaaagttttacaaaaatatttttattctctttctctctttgatggtctcataaaaaaagttttacaaaaatatttttattctctttctctctttgatggtctcataaaaaaagttttacaaaaatatttttattctctttctctctttgatggtctcataaaaaaagttttacaaaaatatttttattctctttctctctttgatggtctcataaaaaagttttacaaaaatatttttattctctttctctctttgatggtctcataaaaaagttttacaaaaatatttttattctctttctctctttgatggtctcataaaaaaagttttacaaaaatatttttattctctttctctctttgatggtctcataa

SEQ ID NO: 3 - DNA, 203057 bp, Vaccinia virus
  GLV-1h68 genome
ttatgagaccatcaaagagagaaagagaataaaaatatttttgtaaaactttttttatgagaccatcaaagagagaaagagaataaaaatatttttgtaaaacttttttatgagaccatcaaagagagaaagagaataaaaatatttttgtaaaacttttttatgagaccatcaaagagagaaagagaataaaaatatttttgtaaaactttttttatgagaccatcaaagagagaaagagaataaaaatatttttgtaaaactttttttatgagaccatcaaagagagaaagagaataaaaatatttttgtaaaactttttttatgagaccatcaaagagagaaagagaataaaaatatttttgtaaaactttttttatgagaccatcaaagagagaaagagaataaaaatatttttgtaaaactttttttatgagaccatcaaagagagaaagagaataaaaatatttttgtaaaactttttttatgagaccatcaaagagagaaagagaataaaaatatttttgtaaaactttttttatgagaccatcaaagagagaaagagaataaaaatatttttgtaaaactttttttatgagaccatcaaagagagaaagagaataaaaatatttttgtaaaactttttttatgagaccatcaaagagagaaagagaataaaaatatttttgtaaaactttttttatgagaccatcaaagagagaaagagaataaaaatatttttgtaaaactttttttatgagaccatcaaagagagaaagagaataaaaatatttttgtaaaactttttttatgagaccatcagaaagaggtttaatatttttgtgatactctgaaaggaaataggaataggaataggaatagtgtcataatcgtatcacactattgagacagaaaaagaagaagtcgcgagaggtaactttttgtgaatgtagttaagaacatttttgttttgcaaaccggaatatagtgtccggtacacttttttaattcgtggtgtgcctgaatcgttcgattaaccctactcatccaatttcagatgaatagagttatcgattcagacacacgctttgagttttgttgaatcgatgagtgaagtatcatcggttgcaccttcagatgccgatccgtcgacatacttgaatccatccttgacctcaagttcagatgattccttgcacatgtctccgatacgaacgctaaactctagattcttgacgcattttgtatcgacgatcgttgaaccgatgatatcttcgtaactcactttcttatgagagatgttagacccgagtactggatgggtcttgatgtcgctgtctttctcttcttcgctacatctgatgtcgatagacacttcacagtctttgatcatagcaagagcttcttcatgagtgatcgcgggagagtccttaccttgtcctggggacacgctggacaatctagcattcactgtgtttccatcagcggattctgagatggatttaatctgaggacatttggtgaatccaaagttcattctcagacctccaccgatgatggagtaataagtggtaggaggatctacatcctcgactgatgtggaatcatcttctgattccacctcgggatctggatctgactcggactctgtaatttccgttacggattggcaaatcttatcattggtcggtgtttggtcttgctttgtgactttgataataacatcgattcccatatgatgtttgttttcttcttccgtacacgaggaggaggatgaggatgattgctgaagactggcaggcatagcagctgccgccaggcacatgcatgccaggacgatatattgtttcataattgctattgattgagtactgttctttatgattctacttccttaccgtgcaataaattagaatatattttctacttttacgagaaattaattattgtatttattatttatgggtgaaaaacttactataaaaagtgggtgggtttggaattagtgatcagtttatgtatatcgcaactaccgggcatatggctatcgacatcgagaacattacccacatgataagagattgtatcagtttcgtagtcttgagtattggtattactatatagtatatagatgtcgcccactagagttactgtctccgaatgcggcatgatagtatcattctttgctttcgttaactgtttggaggaagaatctttgttattgcatttaatctcgaaattcagagtgcacacctttctcctgtaaagaaacctgaagtcgctaccttattaagaacggagaagtatccatcacgaaatacgggattacagtctttatgattcatagtaatagttagttccgacgttgagatggattcgctgagaccggtagtggtcgtccgagtacacgacgtgtcgttaactggatacaggttaatttccacatcgatatagttaaacgtatttctgggtacgggttcgcatttatctgcggaagagacggtgtgagaatatgttccgagaccacacggagaacagatgacgtctccggatactccgtatcctattccacattttgtttgggaaacacatgccttgcatccggatgatcctttgagaagacaataatatccgggagagcattcacagattctattgtgagtcgtgttacacgatcgcgtcttccgttacaacttagacaagcgggtaaatgattattgcgagatgtgaaggtacccgaaccacacggcgtacatcgtgtgttagtcttgctatcgcataatctggaagcgtatgttcccggacacaaattatggcgtttgtattcgttgtctttacactttccatcggatggtgcatgcggtgctatatctcttccgtttattattatacatgagagaaacaatatatacgagtataatacggacttcatgatttaataatgtagtaatcgttgtcttgttcctgtttcctacttctccaatcatatagatattttctttctatcatggataatatttgtaatggttctttccgtacaacatactgtttagatgatattgcgcataatttccggaggcaaatacgatagtctagattgaccgatggtagactctaatttattgagtgctttgtcgacgagtttacttttacgctccatcgatagatggcactgttctatgagatcgtcgtacatgggaaatgaaatgtgactgtctgaatgtatggctttaagatagctgtgataccgtatacaggtcggtgtcggagattcgaatctctttgaggcgacttatgtcacgatgatggaatctatcttatcgaatgatatatttttcataaatacacttttatagtcctcgtttaaacagaatttactatgtagttccgcgaatgactcgtcccttaataggcagtaggctagtatcttttttacgtagtaatcgtcgtagggagagacatcttgtagaacaacgatttcgttttgttttctcttctgtaactgcttttctggatggccgtattgattatcgagcgtgatactcgctccatattccaataaccgctttgcaaattgtatattattgacatcgaccgcgtaatatagtagagttatcgatcatatctatatcatccatgtacttgcttagtatatcaaatacatctatcagtatggtttcataacagtgatacccgcaattattaaatctcgataatatcagaccgtacatacatagacggccattgttcgatacgtgatttacagccgcgtgtccatattttccacgataaaccttacgacgtttacatcgacgagattattattaacaaagtagtcgtgtagaggatagttgttgtccgttatctaacatgcatcgaacgaccatatcgccgtaatgtaagtagtttatcagtatggcttgtacgatggattcatcctgttgtctaaatctctttagaatgttatcgatgatgtagtggttatattctctggaatcgtacgaagtaatactacgcattacgtcgacaagagtatgacgtctctcaataagaagattaacgatttccatgtctacattatatggggttactctaaatcgcttgtttagataatacgcctctaatatagggctgacgtcgtatactctacacgtgtccacatcctttattaataataatttaacaatctctatatctatggttgagaaagaccagtagtattggatgggtaaagatcctccttcgtctctgccatggatggaaacattgttatcgatcaaacatttaattacatccttggatagagattgagattctctatgagacgatatatagtaatgaagagagttcttacacatatcactgtcgtacatacaggtacgaaatacgtaaccggtgctgtaacattctgatttaagaagccatagcaatacttctggtctcggattaggcgtcgttacgtatatatccaccaatccgagaccattgattgcataattcgtattcttggacggacgtatccgtttatccacaattaggtattttagcagacgtaagtcgatattatccgaatacagatcgaaatcatttatattcgacttgagttcgttagaggaatttgaatagctggatatcagtagatgcacaatctgagattttacgtatctatgcttactgtatactcctagcggagttaatccttcgttgtttctacaaagtctctcgactccgcgagagaacaatcttaatgtctgtatcgcatttattggagacgtaacaatgtagcgcattgtttcctcgtctatctatatgttttgataagttgtgacacgtttcaatttctagttttatttttttgtacgtcacatcttcatccagtagacgacatagaatagtgcactctctaccacaataatccatagctattctggtgctaattattcctatttcacgaaggcaatcattcctcataagatgataaaaagtgtagtggagatttagtatttagcagtgcggatatgatccaagagggtgagatagtcgttctcgttcagaatctttcgcagcataagtagtatgtcgatatacttatcgttgaagactctttataaaagtctatttgtttatatttattgcggatagcagtatttccctataaaaagtatacgtcctgtggtgtctttaatcatgtacatgaatggatggtttatgtagaccttcgtacgatataccatcgaaaagttaatcgtaaatactcctgtaacggccgatgcttctgtatactcctcattaacatctataaacgtcgtatgtagaaatttttctacagtgatagtttcattacacatcttgctaaaatctgcataatatccgaatatattagtaagtcctaaattttctaaaatcggtaccagattatacggttctgtcatttccactttaaactttggcatatacaagtctatacttttagtagataacataccacaccattttttaaatttttcatctgttatatttttttctatgttatatataccttctatgtcgtccggtagtataattaccatactagagtttccctcgtatggaatatcgataatagagaatcctccgaataattcattaatatgtacatattgcaagttattctcggtacccaccatcatatcaacgctggtaactatattcttagaaatataaaacttgtctgtatatgtaagatgtttagaaaatggatatttccacattgctttaaaatggacggcgctaacaactgtcatacgagtattaatggatagcggactagtcaataaggaattaattttaccatttgtcattgtcttaacccattcgttgattagttcctttgtttggttagcattattaaagtttacagtttgaaaatcgtcttttattttttgtaggaaggaggcgtggaactcgatactatcgctaccgtatattttatttgcggtagctagtgtcgcacaatacggaatatctacctccatgtcatcattattgtcatcgggtgtattctcattcatattctctatatattttgatagttgttcagctgtagaaccagctgctccatgatttagaatagataaagtagataaaatggaaactggagaaatcaaaacattttcatcagggtgttttaagattagttctttaaagatatccatggtatagacctaacgataacgatatatatcataaataaataatgttaaatttcaatttatgtttgtaccccgtattcatacttaacaaattggtattgcgtacacaatcaatcatattacataccattaataatgcaagcataaaaaattgttagtagatgtttctaaatataggttccgtaagcaaagaatataagaatgaagcggtaatgataaaatcaatcgttatctaaaatgatcatactcatttattttattctattatattaacacatacatttttaacagcaacacattcaatattgtattgttatttttatattatttacacaattaacaatatattattagtttatattactgaattaataatataaaattcccaatcttgtcataaacacacactgagaaacagcataaacacagaatccatcaaaaatgttgataaattatctgatgttgttgttcgctgctatgataatcagatcattcgccgatagtggtaacgctatcgaaacgacattgccagaaattacaaacgctacaacagatattccagctatcagattatgcggtccagagggagatggatattgtttacacggtgactgtatccacgctagagatattgacggtatgtattgtagatgctctcatggttatacaggcattagatgtcagcatgtagtattagtagactatcaacgttcagaaaacccaaacactacaacgtcatatatcccatctcccggtattatgcttgtattagtaggcattattatgtgttgtctattatctgtttataggttcactcgacgaactaaactacctatacaagatatggttgtgccataatttttataaatttttttatgagtatttttacaaaaatgtataaagtgtatgtcttatgtatatttataaaaatgctaagtatgcgatgtatctatgttatttgtatttatctaaacaatacctctacctctagatattatacaaaaattttttatttcggcatattaaagtaaaatctagttaccttgaaaatgaatacagtgggtggttccgtatcaccagtaagaacataatagtcaaatacagtatccgattgagattttgcatacaatactagtctagaaagaaatttgtaatcatcttctgtgacgggagtccatatatctgtatcatcgtctagtttatcagtgtcccatgctatattcctgttatcatcattagttaatgaaaataactctcgtgcttcagaaaagtcaaatattgtatccatacatacatctccaaaactatcgcttatacgtttatctttaacgatacctatacctagatggttatttactaacagacattttccagatctattgactataactcctatagtttccacatcaaccaagtaatgatcatctattgttatataacaataacataactcttttccatttttatcagtatgtatatctatatcaacgtcgtcgttgtagtgaatagtagtcattgatctattatatgaaacggatatgtctagaacggcaattgttttacgtccagttaacactttcgttgatttaaagtctagagtctttgcaaacataatatccttatccgactttatatttcctgtagggtggtataattttattttgcctccacatatcggtgtttccaaatatattactagacaatattccatatagttattagttaagggtacccaattagaacacgtacgcttattatcatcatttggatcgtatttcataaaagttattgtgttatcgatgtcaacacattctacattttttaatcgtctatatagtatttttctgatattttctataatatcagaattgtcttccatcggaagttgtatactatcggaatcagttacatgtttaaataattctctgatgtcattccttatacaatcaaattcattattaaacagtttaatagtctgtagacctttatcgtcgtaaatatccattgtcttattagttacgcttatttttatgtgtttttacgttgctttattatattttataagaatgattgtttgacgaatcacgagaactattaagacacattattaggtatatattataaaaaagtttttgattacgatgttataagaggaaagaggacacattaacatcatacatcaattaactacattcttataacatcgtaatcaaaagaattgcaattttgatgtataacaactgtcaatgggttatggaattgtatattacatattatacggtatgttggtaacgacaaataccggtcggtaattgtctgccggtgtaatagaattatatatatctatctattacaccggccttgtatacataataataagttgtggtagtatgatctccatatttataatttaggactttgtattcagtatttttggaatcataaaaaataaaaaaaagttttactaatttaaaatttaaaaagtatttacatttttttcactgtttagtcgcggatatggaattcgatcctgccaaaatcaatacatcatctatagatcatgtaacaatattacaatacatagatgaaccaaatgatataagactaacagtatgcattatccgaaatattatatcaatatcacaaaaataaatacacatttggctaatcaatttcgggcttggaaaaaacgtatcgccggaagggactatatgactaacttatctagagatacaggaatacaacaatcaaaacttactgaaactatacgtaactgtcaaaaaaatagaaacatatatggtctatatatacactacaatttagttattaattggataaccgatgtgattatcaatcaatattaagagggttggtaaattggtacatagctaataatacctatactccaaatacacccaataatacaacaaccatttctgagttggatatcatcaaaatactaaataaatacgaggacgtgtatagagtaagtaaagaaaaagaatgtggaatttgctatgaagttgtttactcaaaacgatagatactttggtttattggattcgtgtactcatatattttgcataacatgcatcaatatatggcatagaacacgaagagaaaccggtgcgtcggataattgtcctatatgccgtacccgttttagaaacataacaatgagcaagttctataagctagttaactaataaataaaaagtttaatttgttgacgacgtatgtcgttattttttctcgtataaaagattaatttgattctaatataatctttagtattggataaatatcaattcaaattaattccattagattatatcataaataaaaatagtagcacacaactacttcagcaaacattctttttataaatgccatctagcgtagcgaggacacaagtgaacctataattatcaaatttattagtatcagtcacatgaaggactttacgtagagtgacgattccactatctgtggtacgaacggtttcatcttctttgatgccatcacccagatgttctataaacttggtatcctcgtccgatttcatatcctttgccaaccaatacatatagctaaactcaggcatatgttccacacatcctgaacaatgaaattctccagaagatgttacaatgtctagatttggacatttggtttcaaccgcgttaacatatgagtgaacacacccatacatgaaagcgatgagaaataggattctcatcttgccaaaatatcactagaaaaaatttatttatcagttttaaaggtataaaaaatacttattgttgctcgaatattttgtatttgatggtatacggaagattagaaatgtaggtattatcatcaactgattctatggttttatgtattctatcatgtttcactattgcgttggaaataatatcatatgcttccacatatattttattttgttttaactcataatactcacgtaattctggattattggcatatctatgaataattttagctccatgatcagtaaatattaatgagaacatagtattaccacctaccattatttttttcatctcattcaattcttaattgcaaagatctatataatcattatagcgttgacttatggactctggaatcttagacgatgtacagtcatctataatcatggcatatttaatacattgttttatagcatagtcgttatctacgatgttagatatttctctcaatgaatcaatcacacaatctaatgtaggtttatgacataatagcattttcagcagttcaatgtttttagattcgttgatggcaatggctatacatgtatatccgttatttgatctaatgttgacatctgaaccggattctagcagtaaagatactagagattgtttattatatctaacagccttgtgaagaagtgtttctcctcgtttgtcaatcatgttaatgtctttaagataaggtaggcaaatgtttatagtactaagaattgggcaagcataagacatgtcacaaagacccttttttgtatgtataagtgtaaaaattataacatccatagttggatttacataggtgtccaatcgggatctctccatcatcgagataattgatggcatctcccttccttttttagtagatatttcatcgtgtaagaatcaatattaatatttctaaagtatccgtgtatagcctctttatttaccacagctccatattccactagagggatatcgccgaatgtcatatactcaattagtatatgttggaggacatccgagttcattgttttcaatatcaaagagatggtttccttatcatttctccatagtggtacaatactacacattattccgtgcggctttccattttccaaaaacaatttgaccaaatctaaatctacatctttattgtatctataatcactatttagataatcagccataattcctcgagtgcaacatgttagatcgtctatatatgaataagcagtgttatctattcctttcattaacaatttaacgatgtctatatctatatgagatgacttaatataatattgaagagctgtacaatagtttttatctataaaagacggcttgattccgtgattaattagacatttaacaacttccggacgcacatatgctctcgtatccgactctgaatacagatgagagatgatatacagatgcaatacggtaccgcaatttcgtagttgataatcatcatacgcgtatcagtactcgtcctcataaagaacactgcagccattttctatgaacaaatcaataattttagaaacaggatcattgtcattacataattttctataactgaacgatggttttcacatttaacactcaagtcaaatccatgttctaccaacacctttatcaagtcaacgtctacatttttggatttcatatagctgaatatattaaagttatttatgttgctaaatccagtggcttctagtagagccatcgctatatccttattaactttaacatgtctactatttgtgtattcttctaatggggtaagctgtctccaatttttgcgtaatggattagtgccactgtctagtagtagtttgacgacctcgacattattacaatgctcattaaaaaggtatgcgtgtaaagcattattcttgaattggttcctggtatcattaggatctctgtctttcaacatctgtttaagttcatcaagagccacctcctcattttccaaatagtcaaacattttgactgaatgagctactgtgaactctatacacccacacaactaatgtcattaaatatcatgtcaaaaacttgtacaattattaataaaaataatttagtgtttaaattttaccagttccagattttacacctccgttaatacctccattaaccccactggacgatcctcctccccacattccaccgccaccagatgtataagttttagatcctttattactaccatcatgtccatggataaagacactccacatgccgccactaccccctttagaagacatattaataagacttaaggacaagtttaacaataaaattaatcacgagtaccctactaccaacctacactattatatgattatagtttctatttttacagtaccttgactaaagtttctagtcacaagagcaatactaccaacctacactattatatgattatagtttctatttttataggaacgcgtacgagaaaatcaaatgtctaatttctaacggtagtgttgataaacgattgttatccgcggatacctcctctatcatgtcgtctattttcttactttgttctattaacttattagcattatatattatttgattataaaacttatattgcttattagcccaatctgtaaatatcggattattaacatatcgtttctttgtaggtttatttaacatgtacatcactgtaagcatgtccttaccatttattttaatttgacgcatatccgcaatttctttttcgcagtcggttataaattctatatatgatggatacatgctacatgtgtacttataatcgactaatatgaagtacttgatacatattttcagtaacgatttattattaccacctatgaataagtacctgtgatcgtctaggtaatcaactgttttcttaatacattcgatggttggtaatttactcagaataatttccaatatcttaatatataattctgctatttctgggatatatttatctgccagtataacacaaatagtaatacatgtaaacccatattttgttattatattaatgtctgcgccattatctattaaccattctactaggctgacactatgcgactcaatacaatgataaagtatactacatccatgtttatctattttgtttatatcatcaatatacggcttacaaagttttagtatcgataacacatccaactcacgcatagagaaggtagggaataatggcataatatttattaggttatcatcattgtcattatctacaactaagtttccattttttaaaatatactcgacaactttaggatctctattgccaaatttttgaaaatatttatttatatgcttaaatctatataatgtagctccttcatcaatcatacatttaataacattgatgtatactgtatgataagatacatattctaacaatagatcttgtatagaatctgtatatcttttaagaattgtggatattaggatattattacataaactattacacaattctaaaatataaaacgtatcacggtcgaataatagttgatcaactatataattatcgattttgtgatttttcttcctaaactgtttacgtaaatagttagatagaatattcattagttcatgaccactatagttactatcgaataacgcgtcaaatatttcccgtttaatatcgcatttgtcaagataataatagagtgtggtatgttcacgataagtataataacgcatctctttttcgtgtgaaattaaatagtttattacgtccaaagatgtagcataaccatcttgtgacctagtaataatataataatagagaactgttttacccattctatcatcataatcagtggtgtagtcgtaatcgtaatcgtctaattcatcatcccaattataatattcaccagcacgtctaatctgttctattttgatcttgtatccatactgtatgttgctacatgtaggtattcctttatccaataatagtttaaacacatctacattgggatttgatgttgtagcgtatttttctacaatattaataccatttttgatactatttatttctatacctttcgaaattagtaatttcaataagtctatattgatgttatcagaacatagatattcgaatatatcaaaatcattgatatttttatagtcgactgacgacaataacaaaatcacaacatcgtttttgatattattatttttcttggtaacgtatgcctttaatggagtttcaccatcatactcatataatggatttgcaccactttctatcaatgattgtgcactgctggcatcgatgttaaatgttttacaactatcatagagtatcttatcgttaaccatgattggttgttgatgctatcgcattttttggtttctttcatttcagttatgtatggatttagcacgtttgggaagcatgagctcatatgatttcagtactgtagtgtcagtactattagtttcaataagatcaatctctagatctatagaatcaaaacacgataggtcagaagataatgaatatctgtaggcttcttgttgtactgtaacttctggttttgttagatggttgcatcgtgctttaacgtcaatggtacaaattttatcctcgctttgtgtatcatattcgtccctactataaaattgtatattcagattatcatgcgatgtgtatacgctaacggtatcaataaacggagcacaccatttagtcataaccgtaatccaaaaatttttaaagtatatcttaacgaaagaagttgtgtcattgtctacggtgtatggtactagatcctcataagtgtatatatctagagtaatgtttaatttattaaatggttgataatatggatcctcgtgacaatttccgaagatggaaataagacataaacacgcaataaatctaattgcggacatggttactccttaaaaaaatacgaataatcaccttggctatttagtaagtgtcatttaacactatactcatattaatccatggactcataatctctatacgggattaacggatgttctatatacggggatgagtagttctcttctttaactttatactttttactaatcatatttagactgatgtatgggtaatagtgtttgaagagctcgttctcatcatcagaataaatcaatatctctgtttttttgttatacagatgtattacagcctcatatattacgtaatagaacgtgtcatctaccttattaactttcaccgcatagttgtttgcaaatacggttaatcctttgacctcgtcgatttccgaccaatctgggcgtataatgaatctaaactttaattgcttgtaatcattcgaaataatttttagtttgcatccgtagttatcccctttatgtaactgtaaatttctcaacgcgatatctccattaataatgatgtcgaattcgtgctgtatacccatactgaatggatgaacgaataccgacggcgttaatagtaatttactttttcatctttacatattgggtactagttttactatcataagtttataaattccacaagctactatggaataagccaaccatcttagtataccacacatgtcttaaagtttattaattaattacatgttgttttatatatatcgctacgaatttaaagagaaattagtttaggaagaaaaattatctatctacatcatcacgtctctgtattctacgatagagtgctactttaagatgcgacagatccgtgtcatcaaatatatactccattaaaatgattattccggcagcgaacttgatattggatatatcacaacctttgttaatatctacgacaatagacagcagtcccatggttccataaacagtgagtttatctttctttgaagagatattttgtagagatcttataaaactgtcgaatgacatcgcatttatatctttagctaaatcgtatatgttaccatcgtaatatctaaccgcgtctatcttaaacgtttccatcgctttaaagacgtttccgatagatggtctcatttcatcagtcatactgagccaacaaatataatcgtgtataacatctttgatagaatcagactctaaagaaaacgaatcggctttattatacgcattcatgataaacttaatgaaaaatgtttttcgttgtttaagttggatgaatagtatgtcttaataattgttattatttcattaattaatatttagtaacgagtacactctataaaaacgagaatgacataactaatcataactagttatcaaagtgtctaggacgcgtaattttcatatggtatagatcctgtaagcattgtctgtattctggagctattttctctatcgcattagtgagttcagaatatgttataaatttaaatcgaataacgaacataactttagtaaagtcgtctatattaactcttttattttctagccatcgtaataccatgtttaagatagtatattctctagttactacgatctcatcgttgtctagaatatcacatactgaatctacatccaattttagaaattggtctgtgttacatatctcttctatattattgttgatgtattgtcgtagaaaactattacgtagaccattttctttataaaacgaatatatagtactccaattatctttaccgatatatttgcacacataatccattctctcaatcactacatctttaagattttcgttgttaagatatttggctaaactatataattctattagatcatcaacagaatcagtatatatttttctagatccaaagacgaactctttggcgtcctctataatattcccagaaaagatattttcgtgttttagtttatcgagatctgatctgttcatatacgccatgattgtacggtacgttatgataaccgcataaaataaaaatccattttcatttttaaccaatactattcataattgagattgatgtaatactttgttactttgaacgtaaagacagtacacggatccgtatctccaacaagcacgtagtaatcaaatttggtgttgttaaacttcgcaatattcatcaatttagatagaaacttatactcatcatctgttttaggaatccatgtattattaccactttccaacttatcattatcccaggctatgtttcgtccatcatcgttgcgcagagtgaataattcttttgtattcggtagttcaaatatatgatccatgcatagatcggcaaagctattgtagatgtgatttttcctaaatctaatataaaactcgtttactagcaaacactttcctgatttatcgaccaagacacatatggtttctaaatctatcaagtggtggggatccatagttatgacgcagtaacatatattattacattcttgactgtcgctaatatctaaatatttattgttatcgtattggattctgcatatagatggcttgtatgtcaaagatatagaacacataaccaatttatagtcgcgctttacattctcgaatctaaagttaagagatttagaaaacattatatcctcggatgatgttatcactgtttctggagtaggatatattaaagtctttacagatttcgtccgattcaaataaatcactaaataatatcccacattatcatctgttagagtagtatcattaaatctattatattttatgaaagatatatcactgctcacctctatatttcgtacatttttaaactgtttgtataatatctctctgatacaatcagatatatctattgtgtcggtagacgataccgttacatttgaattaatggtgttccattttacaacttttaacaagttgaccaattcatttctaatagtatcaaactctccatgattaaatattttaatagtatccattttatatcactacggacacaaagtagctgacataaaccattgtataatttttatgttttatgtttattagcgtacacattttggaagttccggcttccatgtatttcctggagagcaagtagatgatgaggaaccagatagtttatatccgtacttgcacttaaagtctacattgtcgttgtatgagtatgatcttttaaacccgctagacaagtatccgtttgatattgtaggatgtggacatttaacaatctgacacgtgggtggatcggaccattctcctcctgaacacaggacactagagttaccaatcaacgaatatccactattgcaactataagttacaacgctcccatcggtataaaaatcctcgtatccgttatgtcttccgttggatatagatggaggggattggcatttaacagattcacaaataggtgcctcgggattccataccatagatccagtagatcctaattcacaatacgatttagattcaccgatcaactgatatccgctattacaagagtacgttatactagagccaaagtctactccaccaatatcaagttggccattatcgatatctcgaggcgatgggcatctccgtttaatacattgattaaagagtgtccatccagtacctgtacatttagcatatataggtcccattttttgctttctgtatccaggtagacatagatattctatagtgtctcctatgttgtaattagcattagcatcagtctccacactattcttaaatttcatattaatgggtcgtgacggaatagtacagcatgatagaacgcatcctattcccaacaatgtcaggaacgtcacgctctccaccttcatatttatttatccgtaaaaatgttatcctggacatcgtacaaataataaaaagcccatatatgttcgctattgtagaaattgtttttcacagttgctcaaaaacgatggcagtgacttatgagttacgttacactttggagtctcatctttagtaaacatatcataatattcgatattacgagttgacatatcgaacaaattccaagtatttgattttggataatattcgtattttgcatctgctataattaagatataatcaccgcaagaacacacgaacatctttcctacatggttaaagtacatgtacaattctatccatttgtcttccttaactatatatttgtatagataattacgagtctcgtgagtaattccagtaattacatagatgtcgccgtcgtactctacagcataaactatactatgatgtctaggcatgggagacttttttatccaacgatttttagtgaaacattccacatcgtttaatactacatatttctcatacgtggtataaactccacccattacatatatatcatcgtttacgaataccgacgcgcctgaatatctaggagtaattaagtttggaagtcttatccatttcgaagtgccgtgtttcaaatattctgccacacccgttgaaatagaaaattctaatcctcctattacatataactttccatcgttaacacaagtactaacttctgattttaacgacgacatattagtaaccgttttccattttttcgttttaagatctacccgcgatacggaataaacatgtctattgttaatcatgccgccaataatgtatagacaattatgtaaaacatttgcattatagaattgtctatctgtattaccgactatcgtccaatattctgttctaggagagtaatgggttattgtggatatataatcagagtttttaatgactactatattatgttttataccatttcgtgtcactggctttgtagatttggatatagttaatcccaacaatgatatagcattgcgcatagtattagtcataaacttgggatgtaaaatgttgatgatatctacatcgtttggatttttatgtatccactttaataatatcatagctgtaacatcctcatgatttacgttaacgtcttcgtgggataagatagttgtcagttcatcctttgataattttccaaattctggatcggatgtcaccgcagtaatattgttgattatttctgacatcgacgcattatatagttttttaattccatatcttttagaaaagttaaacatccttatacaatttgtgaaattaatattatgaatcatagtttttacacatagatctactacaggcggaacatcaattattatggcagcaactagtatcatttctacattgtttatggtgatgtttatcttcttccagcgcatatagtctaatagcgattcaaacgcgtgatagtttataccattcaatataatcgcttcatcctttagatggtgatcctgaatgcgtttaaaaaaattatacggagacgccgtaataatttccttattcacttgtataatttccccattgatagaaaatattacgctttccattcttaaagtactataagtaattatagtataatgtaaacgtttatatattcaatatttttataaaaatcattttgacattaattcctttttaaatttccgtctatcatctatagaaacgtattctatgaatttataaaatgcttttacgtgtcctatcgtaggcgatagaaccgctaaaaagcctatcgaatttctacaaaagaatctgttatatggtatagggagagtataaaacattaaatgtccgtacttattaaagtattcagtagccaatcctaactctttcgaatacttattaatggctcttgttctgtacgaatctatttttttgaacaacggacctagtggtatatcttgttctatgtatctaaaataatgtctgactagatccgttagtttaatatccgcagtcatcttgtctagaatggcaaatctaactgcgggtttaggctttagtttagtttctatatctacatctatgtctttatctaacaccaaaaatataatagctaatattttattacaatcatccggatattcttctacgatctcactaactaatgtttctttggttatactagtatagtcactatcggacaaataaagaaaatcagatgatcgatgaataatacatttaaattcatcatctgtaagatttttgagatgtctcattagaatattattagggttagtactcattatcattcggcagctattacttattttattatttttcaccatatagatcaatcattagatcatcaaaatatgtttcaatcatcctaaagagtatggtgaatgactcttcccatctaatttctgaacgttcaccaatgtctctagccactttggcactaatagcgatcattcgcttagcgtcttctatattattaactggttgatttaatctatctagcaatggaccgtcggacagcgtcattctcatgttcttaatcaatgtacatacatcgccgtcatctaccaattcatccaacaacataagctttttaaaatcatcattataataggtttgatcgttgtcatttctccaaagaatatatctaataagtagagtcctcatgcttagttaacaactattttttatgttaaatcaattagtacaccgctatgtttaatacttattcatattttagtttttaggattgagaatcaatacaaaaattaatgcatcattaattttagaaatacttagtttccacgtagtcaatgaaacatttgaactcatcgtacaggacgttctcgtacaggacgtaactataaaccggtttatatttgttcaagatagatacaaatccgataactttttttacgaattctacgggatccactttaaaagtgtcataccgggttctttttatttttttaaacagatcaatggtgtgatgttgattaggtcttttacgaatttgatatagaatagcgtttacatattctccataatggtcaatcgccatttgttcgtatgtcataaattctttaattatatgacactgtgtattatttagttcatccttgttcattgttaggaatctatccaaaatggcaattatactagaactataggtgcgttgtatacacatattgatgtgtctgtttatacaatccatgatatttggatccatgctactaccttcgggtaaaattgtagcatcatataccatttctagtactttaggttcattattatccattgcagaggacgtcatgatcgaatcataaaaaaatatattatttttatgttattttgttaaaaataatcatcgaatacttcgtaagatactccttcatgaacataatcagttacaaaacgtttatatgaagtaaagtatctacgatttttacaaaagtccggatgcataagtacaaagtacgcgataaacggaataataatagatttatctagtctatctttttctatagctttcatagttagatacatggtctcagaagtaggattatgtaacatcagcttcgataaaatgactgggttatttagtcttacacattcgctcatacatgtatgaccgttaactacagagtctacactaaaatgattgaacaatagatagtctaccattgtttcgtattcagatagtacagcgtagtacatggcatcttcacaaattatatcattgtctaatagatatttgacgcatcttatggatcccacttcaacagccatcttaaaatcatattgctttcctttatcattaataatttctagaacatcatctctatcataaaagatacaaatattaactgtttgatccgtaataacattgctagtcaatagcaatttgttaataagatgcgctgggctcaatgtcttaataagaagtgtaagaggactatctccgaatttgttttgtttattaacatccgttgatggaagtaaaagatctataatgtctacattcttgactgttttagagcatacaatatggagaggtgtatttccatcatgatctggttttgagggactaattcctagtttcatcatccatgagattgtagaagcttttggattgtctgacataagatgtctatgaatatgatttttgccaaatttatccactatcctggcttcgaatccgatggacattatttttttaaacactctttctgaaggatctgtacacgccaacaacggaccacatccttcttcatcaaccgagttgttaatcttggctccatactgtaccaataaatttattctctctatgacttcatcatctgttcccgagagataatatagaggtgttttatgctgtttatcacacgcgtttggatctgcgccgtgcgtcagcagcatcgcgactattctattattattaattttagaagctatatgcaatggataatttccatcatcatccgtctcatttggagagtatcctctatgaagaagttcttcgacaaatcgttcatctagtcctttaattccacaatacgcatgtagaatgtgataattatttccagaaggttcgatagcttgtagcatattcctaaatacatctaaatttttactattatatttggcataaagagatagataatactcggccgacataatgttgtccattgtagtataaaaattaatatttctatttctatttctgtatatttgcaacaatttactctctataacaaatatcataacttagtttttttatgtcaagaaggcactggtttagttcatctataaatgtcacgccataactaccacgcatgccatactcagaattatgataaagatatttatccttggggtgtaggtaatggggattaatctttgttggatcagtctctaagttaacacatgtcacacatgatccatttatagttatatcacacgatgatgatttatgaattgattccggaagatcgctatcgtattttgtggttccacaattcatttccatacatgttattgtcacactaatattatgatgaactttatctagccgctgagtggtaaacaacagaacagatagtttattatctttaccaacaccctcagccgctgccacaaatctctgatccgtatccatgatggtcatgtttatttctagtccgtatccagtcaacactatgttagcatttctgtcgatatagctttcactcatatgacactcaccaataatagtagaattaatgtcgtaatttacaccaatagtgagttcggcggcaaagtaccaataccggtaatcttgtcgaggaggacatatagtattcttgtattctaccgaatacccgagagatgcgatacaaaagagcaagactaatttgtaaaccatcttactcaaaatatgtaacaatagtacgatgcaatgagtaagacaataggaaatctatcttatatacacataattattctatcaattttaccaattagttagtgtaatgttaacaaaaatgtgggagaatctaattagtttttctttacacaattgacgtacatgagtctgagttccttgtttttgctaattatttcatccaatttattattcttgacgatatcgagatcttttgtataggagtcaaacttgtattcaacatgcttttctataatcattttagctatttcggcatcatccaatagtacattttccagattagcagaatagatattaatgtcgtatttgaacagagcctgtaacatctcaatgtctttattatctatagccaatttaatgtccggaatgaagagaagggaattattggtgtttgtcgacgtcatatagtcgagcaagagaatcatcatatccacgtgtccattttttatagtgatgtgaatacaactaaggagaatagccagatcaaaagtagatggtatctctgaaagaaagtaggaaacaatacttacatcattaagcatgacggcatgataaaatgaagttttccatccagttttcccatagaacatcagtctccaatttttcttaacaaacagttttaccgtttgcatgttaccactatcaaccgcataatacaatgcggtgtttcccttgtcatcaaattgtgaatcatccagtccactgaatagcaaaatctttactattttggtatcttccaatgtggctgcctgatgtaatggaaattcattctctagaagatttttcaatgctccagcgttcaacaacgtacatactagacgcacgttattatcagctattgcataatacaaggcactatgtccatggacatccgccttaaatgtatctttactagagagaaagcttttcagctgcttagacttccaagtattaattcgtgacagatccatgtctgaaacgagacgctaattagtgtatattttttcattttttataattttgtcatattgcaccagaattaataatatctttaatagatctgattagtagatacatggctatcgcaaaacaacatatacacatttaataaaaataatatttattaagaaaattcagatttcacgtacccatcaatataaataaaataatgattccttacaccgtacccatattaaggagattccaccttacccataaacaatataaatccagtaatatcatgtctgatgatgaacacaaatggtgtattaaattccagtttttcaggagatgatctcgccgtagctaccataatagtagatgcctctgctacagttccttgttcgtcgacatctatctttgcattctgaaacattttataaatatataatgggtccctagtcatatgtttaaacgacgcattatctggattaaacatactaggagccatcatttcggctatcgacttaatatccctcttattttcgatagaaaatttagggagtttaagattgtacactttattccctaattgagacgaccaatagtctaattttgcagccgtgatagaatctgtgaaatgggtcatattatcacctattgccaggtacatactaatattagcatccttatacggaaggcgtaccatgtcatattctttgtcatcgattgtgattgtatttccttgcaatttagtaactacgttcatcatgggaaccgttttcgtaccgtacttattagtaaaactagcattgcgtgttttagtgatatcaaacggatattgccatatacctttaaaatatatagtattaatgattgcccatagagtattattgtcgagcatattagaatctactacattagacataccggatctacgttctactatagaattaattttattaaccgcatctcgtctaaagtttaatctatataggccgaatctatgatattgttgataatacgacggtttaatgcacacagtattatctacgaaactttgataagttagatcagtgtacgtatatttagatgttttcagcttagctaatcctgatattaattctgtaaatgctggacccagatctctttttctcaaatccatagtcttcaataattctattctagtattacctgatgcaggcaatagcgacataaacatagaaaacgaataaccaaacggtgagaagacaatattatcatcttgaatatttttatacgctactataccggcattggtaaatccttgtagacgataggcggacgctgaacacgctaacgatagtatcaataacgcaatcatgattttatggtattaataattaaccttatttttatgttcggtataaaaaaattattgatgtctacacatccttttgtaattgacatctatatatccttttgtataatcaactctaatcactttaacttttacagttttccctaccagtttatccctatattcaacatatctatccatatgcatcttaacactctctgccaagatagcttcagagtgaggatagtcaaaaagataaatatatagagcataatcattctcgtatactctgccctttattacatcacccgcattgggcaacgaataacaaaatgcaagcatcttgttaacgggctcgtaaattgggataaaaattatgtttttattgtcttatatctattttattcaagagaatattcaggaatttctttttccggttgtatctcgtcgcagtatatatcatttgtacattgtttcatattttttaatagtttacaccttttagtaggactagtatcgtacaattcatagctgtattttgaattccaatcacgcataaaaatatcttccaattgttgacgaagacctaatccatcatccggtgtaatattaatagatgctccacatgtatccgtaaagtaatttcctgtccaatttgaggtacctatataggccgttttatcggttaccatatatttggcatggtttaccctagaatacggaatgggaggatcagcatctggtacaataaatagctttacttctatatttatgtttttagattttagcatagcgatagatcttaaaaagtttctcatgataaacgaagatcgttgccagcaactaatcaatagcttaacggatacttgtctgtctatagcggatcttcttaattcatcttctatataaggccaaaacaaaattttacccgccttcgaataaataatagggataaagttcataacagatacataaacgaatttactcgcatttctaatacatgacaataaagcggttaaatcattggttctttccatagtacatagttgttgcggtgcagaagcaataaatacagagtgtggaacgccgcttacgttaatactaagaggatgatctgtattataatacgacggataaaagtttttccaattatatggtagattgttaactccaagataccagtatacctcaaaaatttgagtgagatccgctgccaagttcctattattgaagatcgcaatacccaattccttgacctgagttagtgatctccaatccatgttagcgcttcctaaataaatatgtgtattatcagatatccaaaattttgtatgaagaactcctcctaggatatttgtaatatctatgtatcgtacttcaactccggccatttgtagtctttcaacatcctttaatggtttgttagatttattaacggctactctaactcgtactcctcttttgggtaattgtacaatctcgtttaatattatcgtgccgaaattcgtacccacttcatccgataaactccaataaaaagatgatatatctagtgtttttgtggtattggatagaatttccctccacatgttaaatgtagacaaatatactttatcaaattgcatacctataggaatagtttctgtaatcactgcgattgtattatccggattcattttatttgttaaaagaataatcctatatcacttcactctattaaaaatccaagtttctatttctttcatgactgattttttaacttcatccgtttccttatgaagatgatgtttggcaccttcataaatttttatttctctattacaatttgcatgttgcatgaaataatatgcacctaaaacatcgctaatcttattgtttgttccctggagtatgagagtcggggggtgttaatcttggaaattatttttctaaccttgttggtagccttcaagacctgactagcaaatccagccttaattttttcatgattgactaatgggtcgtattggtatttataaactttatccatatctctagatactgattctggacatagctttccgactggcgcatttggtgtgatggttcccataagtttggcagctagcagattcagtcttgaaacagcatctgcattaactagaggagacattagaatcattgctgtaaacaagtttggattatcgtaagaggctagctcccatggaatgacccaataagtagatttaatagttaccacgtgctgtaccaaagtcatcaatcatcattttttcaccattacttcttccatgtccaatatgatcatgtgagaatactaaaattcctaacgatgatatgttttcagctagttcgtcataacgtccagaatgtttaccagctccatgacttatgaatactaatgccttaggatatgtaataggtttccaatatttacaatatatgtaatcattgtccagattgaacatacagtttgcactcatgattcacgttatataactatcaatattaacagttcgtttgatgatcatattatttttatgttttattgataattgtaaaaacatacaattaaatcaatatagaggaaggagacggctactgtcttttgtaagatagtcatggcgactaaattagattatgaggatgctgttttttactttgtggatgatgataaaatatgtagtcgcgactccatcatcgatctaatagatgaatatattacgtggagaaatcatgttatagtgtttaacaaagatattaccagttgtggaagactgtacaaggaattgatgaagttcgatgatgtcgctatacggtactatggtattgataaaattaatgagattgtcgaagctatgagcgaaggagaccactacatcaattttacaaaagtccatgatcaggaaagtttattcgctaccataggaatatgtgctaaaatcactgaacattggggatacaaaaagatttcagaatctagattccaatcattgggaaacattacagatttgatgaccgacgataatataaacatcttgatactttttctagaaaaaaaattgaattgatgatataggggtcttcataacgcataattattacgttagcattctatatccgtgttaaaaaaaattatcctatcatgtatttgagagttttatatgtagcaaacatgatagctgtgatgccaataagctttagatattcacgcgtgctagtgttagggatggtattatctggtggtgaaatgtccgttatataatctacaaaacaatcatcgcatatagtatgcgatagtagagtaaacatttttatagtttttactggattcatacatcgtctacccaattcggttataaatgaaattgtcgccaatcttacacccaaccccttgttatccattagcatagtattaacttcgttatttatgtcataaactgtaaatgattttgtagatgccatatcatacatgatattcatgtccctattataatcattactaactttatcacaatatatgttgataatatctatatatgatctagtctttgtgggcaactgtctatacaagtcgtctaaacgttgtttactcatatagtatcgaacagccatcattacatggtcccgttccgttgatagataatcgagtatgttagtggacttgtcaaatctatataccatattttctggaagtggatatacatagtcgtgatcaacattattgctagcctcatcttctatatcctgtactataccattatctatatcatctacataatctatgatattattacacataaacatcgacaacatactattgtttattatctaagtcctgttgatccaaacccttgatctcctctatttgtactatctagagattgtacttcttccagttctggataatatatacgttgatagattagctgagctattctatctccagtatttacattaaacgtacattttccattattaataagaatgactcctatgtttcccctataatcttcgtctattacaccacctcctatatcaatgccttttagtgacagaccagacctaggagctattctaccatagcagaacttaggcatggacatactaatatctgtcttaattaactgtctttctcctggagggatagtataatcgtaagcgctatacaaatcatatccggcagcacccggcgattgcctagtaggagatttagctctgttagtttccttaacaaatctaactggtgagttaatattcatgttgaacataaaactaatattttatttcaaaattatttaccatcccatatattccatgaataagtgtgatgattgtacacttctatagtatctatatacgatccacgataaaatcctcctatcaatagcagtttattatccactatgatcaattctggattatccctcggataaataggatcatctatcagagtccatgtattgctggattcacaataaaattccgcatttctaccaaccaagaataaccttctaccgaacactaacgcgcatgatttataatgaggataataagtggatggtccaaactgccactgatcatgattgggtagcaaatattctgtagttgtatcagtttcagaatgtcctcccattacgtatataacattgtttatggatgccactgctggattacatctaggtttcagaagactcggcatattaacccaagcagcatccccgtggaaccaacgctcaacagatgtgggatttggtagacctcctactacgtataatttattgttagcgggtatcccgctagcatacagtctggggctattcatcggaggaattggaatccaattgtttgatatataatttacagctatagcattgttatgtatttcattgttcatccatccaccgatgagatatactacttctccaacatgagtacttgtacacatatggaatatatctataatttgatccatgttcataggatactctatgaatggatacttgtatgatttgcgtggttgtttatcacaatgaaatattttggtacagtctagtatccattttacattatttatacctctgggagaaagataatttgacctgattacatttttgataaggagtagcagatttcctaatttatttcttcgcctcatataccacttaatgacaaaatcaactacataatcctcatctggaacatttagttcatcgctttctagaataagtttcatagatagataatcaaaattgtctatgatgtcatcttccagttccaaaaagtgtttggcaataaagtttttagtatgacataagagattggatagtccgtattctatacccatcatgtaacactcgacacaatattcctttctaaaatctcgtaagataaagtttatacaagtgtagatgataaattctacagaggttaatatagaagcacgtaataaattgacgacgttatgactatctatatatacctttccagtatatgagtaaataactatagaagttaaactgtgaatgtcaaggtctagacaaacccttgtaactggatctttatttttcgtgtatttttgacgtaaatgtgtgcgaaagtaaggagataactttttcaatatcgtagaattgactattatattgcctcctatggcatcaataattgttttgaatttcttagtcatagacaatgctaatatattcttacagtacacagtattgacaaatatcggcatttatgtttctttaaaagtcaacatctagagaaaaatgattatctttttgagacataactcccattttttggtattcacccacacgtttttcgaaaaaattagtttttccttccaatgatatattttccatgaaatcaaacggattggtaacattataaatttttttaaatcccaattcagaaatcaatctatccgcgacgaattctatatatgttttcatcatttcacaattcattcctataagtttaactggaagagccgcagtaagaaattcttgttcaatggatactgcatctgttataatagatctaacggtttcttcactcggtggatgcaataaatgtttaaacatcaaacatgcgaaatcgcagtgcagaccctcgtctctactaattagttcgttggaaaacgtgagtccgggcattaggccacgctttttaagccaaaatatggaagcgaatgatccagaaaagaaaattccttctactgcagcaaaggcaataagtctctctccataaccggcgctgtcatgtatccacttttgagcccaatcggccttcttttttacacaaggcatcgtttctatggcattaaagagatagtttttttcattactatctttaacataagtatcgatcaaaagactatacatttccgaatgaatgttttcaatggccatctgaaatccgtagaaacatctagcctcggtaatctgtacttctgtacaaaatcgttccgccaaattttcattcactattccgtcactggctgcaaaaaacgccaatacatgttttataaaatatttttcgtctggtgttagtttattccaatcattgatatctttagatatatctacttcttccactgtccaaaatgatgcctctgcctttttatacatgttccagatgtcatgatattggattgggaaaataacaaatctatttggatttggtgcaaggatgggttccataactaaattaacaataacaataaattttttttcagttatctatatgcctgtacttggattttttgtacatcgatatcgccgcaatcactacaataattacaagtattattgatagcattgttattagtactatcataattaaattatctacattcatgggtgctgaataatcgttattatcatcattatcattttgtaattgtgacatcatactagataaatcgtttgcgagattgttgtgggaagcgggcatggaggatgcattatcattattatttaacgccttccatttggattcacaaatgttacgcacattcaacattttatggaaactataattttgtgaaaacaaataacaagaaaactcgtcatcgttcaaatttttaacgatagtaaaccgattaaacgtcgagctaatttctaacgctagcgactctgttggatatgggtttccagatatatatcttttcagttcccctacgtatctataatcatctgtaggaaatggaagatatttccatttatctactgttcctaatatcatatgtggtggtgtagtagaaccattaagcgcgaaagatgttatttcgcatcgtattttaacttcgcaataatttctggttagataacgcactctaccagtcaagtcaatgatattagcctttacagatatattcatagtagtcgtaacgatgactccatcttttagatgcgatactcctttgtatgtaccagaatcttcgtacctcaaactcgatatatttaaacaagttaatgagatattaacgcgttttatgaatgatgatatataaccagaagttttatcctcggtggctagcgctataaccttatcattataataccaactagtgtgattaatatgtgacacgtcagtgtgggtacaaatatgtacattatcgtctacgtcgtattcgatacatccgcatacagccaacaaatataaaatgacaaatactctaacgccgttcgtacccatcttgatgcggtttaataaatgttttgatttcaatttattgtaaaaaaagattcggttttatactgttcgatattctcattgcttatattttcatctatcatctccacacagtcaaatccgtggttagcatgcacctcatcaaccggtaaaagactatcggactcttctatcattataactctagaatatttaatttggtcattattaatcaagtcaattatcttatttttaacaaacgtgagtattttactcattttttataaaaacttttagaaatatacagactctatcgtgtgtctatatcttctttttatatccaatgtatttatgtctgatttttcttcatttatcatatataatggtccaaattctacacgtgcttcggattcatccagatcattaaggttcttataattgtaacatccttctcttccctcttctacatcttccttcttattcttattcttagcgtcacagaatctaccacagcaggatcccatgacgagcgtcatattaaactaatccattttcaattataatatatgattagtaatgaccattaaaataaaaaatattcttcataaccggcaagaaagtgaaaagttcacattgaaactatgtcagtagtatacatcatgaaatgatgatatatatatactctattttggtggaggattatatgatataattcgtggataatcatttttaagacacatttctttattcgtaaatcttttcacgttaaatgagtgtccatattttgcaatttcttcatatgatggcggtgtacgtggacgaggctgctcctgttcttgttgtggtcgccgactgtcgtgtctgcgtttagatccctccattatcgcgattgcgtagatggagtactattttataccttgtaattaaatttttttattaattaaacgtataaaaacgttccgtatctgtatttaagagccagatttcgtctaatagaacaaatagctacagtaaaaataactagaataattgctacacccactagaaaccacggatcgtaatacggcaatcggttttcgataataggtggaacgtatattttatttaaggacttaacaattgtctgtaaaccacaatttgcttccgcggatcctgtattaactatctgtaaaagcatatgttgaccgggcggagccgaacattctccgatatctaatttctgtatatctataatattattaacctccgcatacgcattacagttcttttctagcttggataccgcactaggtacatcgtctagatctattcctatttcctcagcgatagctcttctatccttttccggaagcaatgaaatcacttcaataaatgattcaaccatgagtgtgaaactaagtcgagaattactcatgcatttgttagttattcggagcgcgcaatttttaaactgtcctataacctctcctatatgaatagcacaagtgacattagtagggatagaatgttgagctaatttttgtaaataactatctataaaaagattatacaaagttttaaactctttagtttccgccatttatccagtctgagaaaatgtctctcataataaatttttccaagaaactaattgggtgaagaatggaaacctttaatctatatttatcacagtctgttttggtacacatgatgaattcttccaatgccgtactaaattcgatatctttttcgatttctggatatgtttttaataaagtatgaacaaagaaatggaaatcgtaataccagttatgtttaactttgaaattgttttttattttcttgttaatgattccagccacttgggaaaagtcaaagtcgtttaatgccgatttaatacgttcattaaaaacaaactttttatcctttagatgaattattattggttcattggaatcaaaaagtaagatattatcgggtttaagatctgcgtgtaaaaagttgtcgcaacagggtagttcgtagattttaatgtataacagagccatctgtaaaaagataaactttatgtattgtaccaaagatttaaatcctaatttgatagctaactcggtatctactttatctgccgaatacagtgctaggggaaaaattataatgtttcctctttcatattcgtagttagttctcttttcatgttcgaaaaagtgaaacatgcggttaaaatagtttataacattaatattactgttaataactgccggataaaagtgggatagtaatttcacgaatttgatactgtcctttctctcgttaaacgcctttaaaaaaactttagaagaatatctcaatgagagttcctgaccatccatagtttgtatcaataatagcaacatatgaagaacacgtttatacagagtatgtaaaaatgttaatttatagtttaatcccatggcccacgcacacacgattaattttttttcatctccctttagattgttgtatagaaatttgggtactgtgaactccgccgtagtttccatgggactatataattttgtggcctcgaatacaaattttactacatagttatctatcttaaagactataccatatcctcctgtagatatgtgataaaaatcgtcgtttataggataaaatcgtttatccttttgttggaaaaaggatgaattaatgtaatcattctcttctatctttagtagtgtttccttattaaaattcttaaaataatttaacaatctaactgacggagcccaattttggtgtaaatctaattgggacattatattgttaaaatacaaacagtctcctaatataacagtatctgataatctatggggagacatccattgatattcaggggatgaatcattggcaacacccatttattgtacaaaaagccccaatttacaaacgaaagtccaggtttgatagagacaaacaattaactattttgtctctgtttttaacacctccacagtttttaatttctttagtaatgaaattattcacaatatcagtatcttctttatctaccagagattttactaacttgataaccttggctgtctcattcaatagggtagtaatatttgtatgtgtgatattgatatctttttgaattgtttcttttagaagtgattctttgatggtgccagcatacgaattacaataatgcagaaactcggttaacatgcaggaattatagtaagccaattccaattgttgcctgtgttgtattagagtgtcaatatgagcaatggtgtccttgcgtttctctgatagaatgcgagcagcgattttggcgttatcatttgacgatatttctggaatgacgaatcctgtttctactaactttttggtaggacaaagtgaaacaatcaagaagatagcttctcctcctatttgtggaagaaattgaactcctctagatgatctactgacgatagtatctccttgacagatattggaccgaattacagaagtacctggaatgtaaagccctgaaaccccctcattttttaagcagattgttgccgtaaatcctgcactatgcccaagatagagagctcctttggtgaatccatctctatgtttcagtttaaccaagaaacagtcagctggtctaaaatttccatctctatctaatacagcatctaacttgatgtcaggaactatgaccggtttaatgttatatgtaacattgagtaaatccttaagttcataatcatcactgtcatcagttatgtacgatccaaacaatgtttctaccggcatagtggatacgaagatgctatccatcagaatgtttccctgattagtattttctatatagctattcttctttaaacgattttccaaatcagtaactatgttcatttttttaggagtaggacgcctagccagtatggaagaggattttctagatcctctcttcaacatctttgatctcgatggaatgcaaaaccccatagtgaaacaaccaacgataaaaataatattgtttttcactttttataattttaccatctgactcatggattcattaatatctttataagagctactaacgtataattctttataactgaactgagatatatacaccggatctatggtttccataattgagtaaatgaatgctcggcaataactaatggcaaatgtatagaacaacgaaattatactagagttgttaaagttaatattttctatgagctgttccaataaattatttgttgtgactgcgttcaagtcataaatcatcttgatactatccagtaaaccgtttttaagttctggaatattatcatcccattgtaaagcccctaattcgactatcgaatatcctgctctgatagcagtttcaatatcgacggacgtcaatactgtaataaaggtggtagtattgtcatcatcgtgataaactacgggaatatggtcgttagtaggtacggtaactttacacaacgcgatatataactttccttttgtaccatttttaacgtagttgggacgtcctgcagggtattgttttgaagaaatgatatcgagaacagatttgatacgatatttgttggattcctgattattcactataatataatctagacagatagatgattcgataaatagagaaggtatatcgttggtaggataatacatccccattccagtattctcggatactctattgatgacactagttaagaacatgtcttctattctagaaaacgaaaacatcctacatggactcattaaaacttctaacgctcctgattgtgtctcgaatgcctcgtacaaggatttcaaggatgccatagattctttgaccaacgatttagaattgcgtttagcatctgatttttttattaaatcgaatggtcggctctctggtttgctaccccaatgataacaatagtcttgtaaagataaaccgcaagaaaatttatacgcatccatccaaataaccctagcaccatcggatgatattaatgtattattatagattttccatccacaattattgggccagtatactgttagcaacggtatatcgaatagattactcatgtaacctactagaatgatagttcgtgtactagtcataatatctttaatccaatctaaaaaatttaaaattagattttttacactgttaaagttaacaaaagtattacccgggtacgtggatatcatatatggcattggtccattatcagtaatagctccataaactgatacggcgatggtttttatatgtgtttgatctaacgaggaagaaattcgcgcccacaattcatctctagatatgtatttaatatcaaacggtaacacatcaatttcgggacgcgtatatgtttctaaatttttaatccaaatataatgatgacctatatgccctattatcatactgtcaactatagtacacctagggaacttacgatacatctgtttcctataatcgttaaattttacaaatctataacatgctaaaccttttgacgacagccattcattaatttctgatatggaatctgtattctcgataccgtatcgttctaaagccagtgctatatctccctgttcgtgggaacgctttcgtataatatcgatcaacggataatctgaagtttttggagaataatatgactcatgatctatttcgtccataaacaatctagacataggaattggaggcgatgatcttaattttgtgcaatgagtcgtcaatcctataacttctaatcttgtaatattcatcatcgacataatactatctatgttatcatcgtatattagtataccatgaccttcttcatttcgtgccaaaatgatatacagtcttaaatagttacgcaatatctcaatagtttcataattgttagctgttttcatcaaggtttgtatcctgtttaacatgatggcgttctataacgtctctattttctatttttaattttttaaatttttaacgatttactgtggctagatacccaatctctctcaaatatttttttagcctcgcttacaagctgtttatctatactattaaaactgacgaatccgtgattttggtaatgggttccgtcgaaatttgccgaagtgatatgaacatattcgtcgtcgactatcaacaattttgtattattctgaatagtgaaaaccttcacagatagatcattttgaacacacaacgcatctagacttttggcggttgccatagaatatacgtcgttcttatcccaattaccaactagaagtctgatcttaactcctctattaatggctgcttctataatggagttgtaaatgtcgggccaatagtagctattaccgtcgacacgtgtagtgggaactatggccaaatgttcaatatctatactagtcttagctgacctgagtttatcaataactacatcggtatctagatctctagaatatcccaataggtgttccggagaatcagtaaagaacactccacctataggattcttaatatgatacgcagtgctaactggcaaacaacaagccgcagagcataaattcaaccatgaattttttgcgctattaaaggctttaaaagtatcaaatcttctacgaagatctgtggccagcgggggataatcagaatatacacctaacgttttaatcgtatgtatagatcctccagtaaatgacgcgtttcctacataacatctttcatcatctgacacccaaaaacaaccgagtagtagtcccacattattttttttatctatattaacggttataaaatttatatccgggcagtgactttgtagctctcccagatttcttttccctcgttcatctagcaaaactattattttaatccctttttcagatgcctcttttagtttatcaaaaataagcgctcccctagtcgtactcagaggattacaacaaaaagatgctatgtatatatatttcttagctagagtgataatttcgttaaaacattcaaatgttgttaaatgatcggatctaaaatccatattttctggtagtgtttctaccagcctacattttgctcccgcaggtaccgatgcaaatggccacatttagttaacataaaaacttatacatcctgttctatcaacgattctagaatatcatcggctatatcgctaaaattttcatcaaagtcgacatcacaacctaactcagtcaatatattaagaagttccatgatgtcatcttcgtctatttctatatccgtatccattgtagattgttgaccgattatcgagtttaaatcattactaatactcaatccttcagaatacaatctgtgtttcattgtaaatttataggcggtgtatttaagttggtagattttcaattatgtattaatatagcaacagtagttcttgctcctccttgattctagcatcctcttcattattttcttctacgtacataaacatgtccaatacgttagacaacacaccgacgatggcggccgcagatctcgagttatgatctacttccttaccgtgcaataaattagaatatattttctacttttacgagaaattaattattgtatttattatttatgggtgaaaaacttactataaaaagcgggtgggtttggaattagtgaaagcttaaaaattgaaattttattttttttttttggaatataaataagctcgaagtcgacagatctaggcctggtaccaggaggaggaattcagcttaaagatgacttcgaaagtttatgatccagaacaaaggaaacggatgataactggtccgcagtggtgggccagatgtaaacaaatgaatgttcttgattcatttattaattattatgattcagaaaaacatgcagaaaatgctgttatttttttacatggtaacgcggcctcttcttatttatggcgacatgttgtgccacatattgagccagtagcgcggtgtattataccagatcttattggtatgggcaaatcaggcaaatctggtaatggttcttataggttacttgatcattacaaatatcttactgcatggtttgaacttcttaatttaccaaagaagatcatttttgtcggccatgattggggtgcttgtttggcatttcattatagctatgagcatcaagataagatcaaagcaatagttcacgctgaaagtgtagtagatgtgattgaatcatgggatgaatggcctgatattgaagaagatattgcgttgatcaaatctgaagaaggagaaaaaatggttttggagaataacttcttcgtggaaaccatgttgccatcaaaaatcatgagaaagttagaaccagaagaatttgcagcatatcttgaaccattcaaagagaaaggtgaagttcgtcgtccaacattatcatggcctcgtgaaatcccgttagtaaaaggtggtaaacctgacgttgtacaaattgttaggaattataatgcttatctacgtgcaagtgatgatttaccaaaaatgtttattgaatcggatccaggattcttttccaatgctattgttgaaggcgccaagaagtttcctaatactgaatttgtcaaagtaaaaggtcttcatttttcgcaagaagatgcacctgatgaaatgggaaaatatatcaaatcgttcgttgagcgagttctcaaaaatgaacaagcggccgccgccaccatgagcaagggcgaggaactgttcactggcgtggtcccaattctcgtggaactggatggcgatgtgaatgggcacaaattttctgtcagcggagagggtgaaggtgatgccacatacggaaagctcaccctgaaattcatctgcaccactggaaagctccctgtgccatggccaacactggtcactaccttcacctatggcgtgcagtgcttttccagatacccagaccatatgaagcagcatgactttttcaagagcgccatgcccgagggctatgtgcaggagagaaccatctttttcaaagatgacgggaactacaagacccgcgctgaagtcaagttcgaaggtgacaccctggtgaatagaatcgagctgaagggcattgactttaaggaggatggaaacattctcggccacaagctggaatacaactataactcccacaatgtgtacatcatggccgacaagcaaaagaatggcatcaaggtcaacttcaagatcagacacaacattgaggatggatccgtgcagctggccgaccattatcaacagaacactccaatcggcgacggccctgtgctcctcccagacaaccattacctgtccacccagtctgccctgtctaaagatcccaacgaaaagagagaccacatggtcctgctggagtttgtgaccgctgctgggatcacacatggcatggacgagctgtacaagtgagcggccgccctgctagcaagcttgctagcggccgctcgagatctgcggccgctacagacacgaatatgactaaaccgatgaccatttaaaaacccctctctagctttcacttaaactgtatcgatcattcttttagcacatgtataatataaaaacattattctatttcgaatttaggcttccaaaaatttttcatccgtaaaccgataataatatatatagacttgttaatagtcggaataaatagattaatgcttaaactatcatcatctccacgattagagatacaatatttacattctttttgctgtttcgaaactttatcaatacacgttaatacaaacccaggaaggagatattgaaactgaggctgttgaaaatgaaacggtgaatacaataattcagataatgtaaaatcatgattccgtattctgatgatattagaactgctaatggatgtcgatggtatgtatctaggagtatctattttaacaaagcatcgatttgctaatatacaattatccttttgattaattgttattttattcatattcttaaaaggtttcatatttatcaattcttctacattaaaaatttccatttttaatttatgtagccccgcaatactcctcattacgtttcattttttgtctataatatccattttgttcatctcggtacatagattatccaattgagaagcgcatttagtagttttgtacattttaagtttattgacgaatcgtcgaaaactagttatagttaacattttattatttgataccctgatattaatacccctgccgttactattatttataactgatgtaatccacgtaacattggaattaactatcgatagtaatgcatcgacgcttccaaaattgtctattataaactcaccgataatttttttattgcatgttttcatattcattaggattatcaaatctttaatcttattacgattgtatgcgttgatattacaagacgtcattctaaaagacggaggatctccatcaaatgccagacaatcacgtacaaagtacatggaaataggttttgttctattgcgcatcatagatttatatagaacacccgtagaaatactaatttgttttactctataaaatactaatgcatctatttcatcgttttgtataacgtctttccaagtgtcaaattccaaatttttttcattgatagtaccaaattcttctatctctttaactacttgcatagataggtaattacagtgatgcctacatgccgttttttgaaactgaatagatgcgtctagaagcgatgctacgctagtcacaatcaccactttcatatttagaatatatatatgtaaaaatatagtagaatttcattttgtttttttctatgctataaatgaattctcattttgcatctgctcatactccgttttatattaataccaaagaaggaagatatctggttctaaaagccgttaaagtatgcgatgttagaactgtagaatgcgaaggaagtaaagcttcctgcgtactcaaagtagataaaccctcatcgcccgcgtgtgagagaagaccttcgtccccgtccagatgcgagagaatgaataaccctggaaaacaagttccgtttatgaggacggacatgctacaaaatatgttcgcggctaatcgcgataatgtagcttctagacttttgtcctaaaatactattatatccttttcgatattaataaatccgtgtcgtccaggttttttatctctttcagtatgtgaatagataggtattttatctctattcatcatcgaatttaagagatccgataaacattgtttgtattctccagatgtcagcatctgatacaacaatatatgtgcacataaacctctggcacttatttcatgtaccttccccttatcactaaggagaatagtatttgagaaatatgtatacatgatattatcatgaattagatatacagaatttgtaacactctcgaaatcacacgatgtgtcggcgttaagatctaatatatcactcgataacacattttcatctagatacactagacattttttaaagctaaaatagtctttagtagtaacagtaactatgcgattattttcatcgatgatacatttcatcggcatattattacgcttaccatcaaagactataccatgtgtatatctaacgtattctagcatggttgccatacgcgcattaaacttttcaggatctttggatagatcttccaatctatctatttgagaaaacatttttatcatgttcaatagttgaaacgtcggatccactatatagatattatctataaagattttaggaactacgttcatggtatcctggcgaatattaaaactatcaatgatatgattatcgttttcatcttttatcaccatatagtttctaagatatgggattttacttaatataatattatttcccgtgataaattttattagaaaggccaaatctataagaaaagtcctagaattagtctgaagaatatctatatcgccgtatagtatatttggattaattagatatagagaatatgatccgtaacatatacaacttttattatggcgtctaagatattcttccatcaacttattaacatttttgactagggaagatacattatgacgtcccattacttttgccttgtctattactgcgacgttcatagaatttagcatatctcttgccaattcttccattgatgttacattataagaaattttagatgaaattacatttggagctttaatagtaagaactcctaatatgtccgtgtatgtggtcactaatacagattgtagttctataatcgtaaataatttacctatattatatgtttgagtctgtttagaaaagtagctaagtatacgatcttttatttctgatgcagatgtattaacatcggaaaaaaatctttttttattcttttttactaaagatacaaatatgtctttgttaaaaacagttattttctgaatatttctagcttgtaattttaacatatgatattcgttcacactaggtactctgcctaaataggtttctataatctttaatgtaatattaggaaaagtattctgatcaggattcctattcattttgaggatttaaaactctgattattgtctaatatggtctctacgcaaactttttcacagagcgatagagtttttgataactcgtttttcttaagaaatataaaactactgtctccagagctcgctctatcttttattttatctaattcgatacaaactcctgatactggttcagaaagtaattcattaattttcagtcctttatagaagatatttaatatagataatacaaaatcttcagtttttgatatcgatctgattgatcctagaactagatatattaataacgtgctcattaggcagtttatggcagcttgataattagatatagtatattccagttcatatttattagataccgcattgcccagattttgatattctatgaattcctctgaaaataaatccaaaataactagacattctattttttgtggattagtgtactctcttccctctatcatgttcactactggtgtccacgatgataaatatctagagggaatataatatagtccataggatgccaatctagcaatgtcgaataactgtaattttattcttcgctcttcattatgaattgattcttgaggtataaacctaacacaaattatattattagacttttcgtatgtaatgtctttcatgttataagtttttaatcctggaatagaatctattttaatgaggcttttaaacgcagagttctccaacgagtcaaagcataatactctgttgtttttcttatatacgatgttacgattttcttctttgaatggaataggtttttgaattagtttataattacaacataatagataaggaagtgtgcaaatagtacgcggaaaaaacataatagctcccctgttttcatccatggttttaagtaaatgatcactggcttctttagtcaatggatattcgaacattaaccgtttcatcatcattggacagaatccatatttcttaatgtaaagagtgatcaaatcattgtgtttattgtaccatcttgttgtaaatgtgtattcggttatcggatctgctcctttttctattaaagtatcgatgtcaatctcgtctaagaattcaactatatcgacatatttcatttgtatacacataaccattactaacgtagaatgtataggaagagatgtaacgggaacagggtttgttgattcgcaaactattctaatacataattcttctgttaatacgtcttgcacgtaatctattatagatgccaagatatctatataattattttgtaagatgatgttaactatgtgatctatataagtagtgtaataattcatgtattttgatatatgttccaactctgtctttgtgatgtctagtttcgtaatatctatagcatcctcaaaaaatatattcgcatatattcccaagtcttcagttctatcttctaaaaaatcttcaacgtatggaatataataatctattttacctcttctgatatcattaatgatatagtttttgacactatcttctgtcaattgattcttattcactatatctaagaaacggatagcgtccctaggacgaactactgccattaatatctctattatagcttctggacataattcatctattataccagaattaatgggaactattccgtatctatctaacatagttttaagaaagtcagaatctaagacttgatgttcatatattggttcatacatgaaatgatctctattgatgatagtgactatttcattctctgaaaattggtaactcattctatatatgctttccttgttgatgaaggatagaatatactcaatagaatttgtaccaacaaactgttctcttatgaatcgtatatcatcatctgaaataatcatgtaaggcatacatttaacaattagagacttgtctcctgttatcaatatactattcttgtgataatttatgtgtgaggcaaatttgtccacgttctttaattttgttatagtagatatcaaatccaatggagctacagttcttggcttaaacagatatagtttttctggaacaaattctacaacattattataaaggactttgggtagataagtgggatgaaatcctattttaattaatgcgatagccttgtcctcgtgcagatatccaaacgcttttgtgatagtatggcattcattgtctagaaacgctctacgaatatctgtgacagatatcatctttagagaatatactagtcgcgttaatagtactacaatttgtattttttaatctatctcaataaaaaaattaatatgtatgattcaatgtataactaaactactaactgttattgataactagaatcagaatctaatgatgacgtaaccaagaagtttatctactgccaatttagctgcattatttttagcatctcgtttagattttccatcggccttatcgaatactcttccgtcgatgtctacacaggcataaaatgtaggagagttactaggcccaactgattcaatacgaaaagaccaatctctcctagtaatttggcagtactcattaataacggtgacagggttagcatctttccaatcaataatttttttagccggaataacatcatcaaaagacttatgatcctctctcattgatttttcgcgggatacatcatctattatgacgtcagccatagcatcagcatccggcttatccgcctccgttgtcataaaccaacgaggaggaatatcgtcggagctgtacaccatagcactacgttgaagatcgtacagagctttattaacttctcgcttctccatattaagttgtctagttagttgtgcagcagtagctccttcgattccaatgtttttaatagccgcacacacaatctctgcgtcagaacgctcgtcaatatagatcttagacatttttagagagaactaacgcaaccagcaataaaactgaacctactttatcatttttttattcatcatcctctggtggttcgtcgttcctatcaaatgtagctctgattaacccgtcatctataggtgatgctggttctggagattctggaggagatggattattatctggaagaatctctgttatttccttgttttcatgtatcgattgcgttgtaacattaagattgcgaaatgctctaaatttgggaggcttaaagtgttgtttgcaatctctacacgcgtgtctaactagtggaggttcgtcagctgctctagtttgaatcatcatcggcgtagtattcctacttttacagttaggacacggtgtattgtatttctcgtcgagaacgttaaaataatcgttgtaactcacatcctttattttatctatattgtattctactcctttcttaatgcattttataccgaataagagatagcgaaggaattctttttcggtgccgctagtacccttaatcatatcacatagtgttttatattccaaatttgtggcaatagacggtttatttctatacgatagtttgtttctggaatcctttgagtattctataccaatattattctttgattcgaatttagtttcttcgatattagattttgtattacctatattcttgatgtagtactttgatgatttttccatggcccattctattaagtcttccaagttggcatcatccacatattgtgatagtaattctcggatatcagtagcggctaccgccattgatgtttgttcattggatgagtaactactaatgtatacattttccatttataacacttatgtattaactttgttcatttatattttttcattattatgttgatattaacaaaagtgaatatatatatgttaataattgtattgtggttatacggctacaattttataatgagtgaaagtcagtgtccgatgatcaatgacgatagctttactctgaaaagaaagtatcaaatcgatagtgcggagtcaacaataaaaatggataagaagaggataaagtttcagaatagagccaaaatggtaaaagaaataaatcagacaataagagcagcacaaactcattacgagacattgaaactaggatacataaaatttaagagaatgattatgactactactctagaagatatagcaccatctattccaaataatcagaaaacttataaactattctcggacatttcagccatcggcaaagcatcacagaatccgagtaagatggtatatgctctgctgctttacatgtttcccaatttgtttggagatgatcatagattcattcgttatagaatgcatccaatgagtaaaatcaaacacaagatcttctctcctttcaaacttaatcttattagaatattagtggaagaaagattctataataatgaatgcagatctaataaatggagaataattggaacacaagttgataaaatgttgatagctgaatctgataaatatacaatagatgcaaggtataacctaaaacccatgtatagaatcaagggagaatctgaagaagataccctctttatcaaacagatggtagaacaatgtgtgacatcccaggaattggtggaaaaagtgttgaagatactgtttagagatttgttcaagagtggagaatacaaagcgtacagatacgatgatgatgtagaaaatggatttattggattggatacactaaaattaaacattgttcatgatatagttgaaccatgtatgcctgttcgtaggccagtggctaagatactgtgtaaagaaatggtaaataaatactttgagaatccgctacatattattggtaaaaatcttcaagagtgcattgactttgttagtgaataggcatttcatctttctccaatactaattcaaattgttaaattaataatggatagtataaatagttattagttataagatagtaaaaataattattagaataagagtgtagtatcatagataactctcttctataaaaatggattttattcgtagaaagtatcttatatacacagtagaaaataatatagattttttaaaggatgatacattaagtaaagtaaacaattttaccctcaatcatgtactagctctcaagtatctagttagcaattttcctcaacacgttattactaaggatgtattagctaataccaatttttttgttttcatacatatggtacgatgttgtaaagtgtacgaagcggttttacgacacgcatttgatgcacccacgttgtacgttaaagcattgactaagaattatttatcgtttagtaacgcaatacaatcgtacaaggaaaccgtgcataaactaacacaagatgaaaaatttttagaggttgccgaatacatggacgaattaggagaacttataggcgtaaattatgacttagttcttaatccattatttcacggaggggaacccatcaaagatatggaaatcatttttttaaaactgtttaagaaaacagacttcaaagttgttaaaaaattaagtgttataagattacttatttgggcatacctaagcaagaaagatacaggcatagagtttgcggataatgatagacaaaatatatacactctatttcaacaaactggtagaatcgtccatagcaatctaacagaaacgtttagagattatatctttcccggagataagactagctattgggtgtggttaaacgaaagtatagctaatgatgcggatatcgttcttaatagacacgccattaccatgtatgataaaattcttagttatatatactctgagataaaacaaggacgcgttaataaaaacatgcttaagttagtttatatctttgagcctgaaaaagatatcagagaacttctgctagaaatcatatatgatattcctggagatatcctatctattattgatgcaaaaaacgacgattggaaaaaatattttattagtttttataaagctaattttattaacggtaatacatttattagtgatagaacgtttaacgaggacttattcagagttgttgttcaaatagatcccgaatatttcgataatgaacgaattatgtctttattctctacgagtgctgcggacattaaacgatttgatgagttagatattaataacagttatatatctaatataatttatgaggtgaacgatatcacattagatacaatggatgatatgaagaagtgtcaaatctttaacgaggatacgtcgtattatgttaaggaatacaatacatacctgtttttgcacgagtcggatcccatggtcatagagaacggaatactaaagaaactgtcatctataaaatccaagagtagacggctgaacttgtttagcaaaaacattttaaaatattatttagacggacaattggctcgtctaggtcttgtgttagatgattataaaggagacttgttagttaaaatgataaaccatcttaagtctgtggaggatgtatccgcattcgttcgattttctacagataaaaaccctagtattcttccatcgctaatcaaaactattttagctagttataatatttccatcatcgtcttatttcaaaggtttttgagagataatctatatcatgtagaagaattcttggataaaagcatccatctaaccaagacggataagaaatatatacttcaattgataagacacggtagatcatagaacagaccaaatatattattaataatttgtatatacatagatataattatcacacatttttgataaatgggaactgctgcaacaattcagactcccaccaaattaatgaataaagaaaatgcagaaatgattttggaaaaaattgttgatcatatagttatgtatattagtgacgaatcaagtgattcagaaaataatcctgaatatattgattttcgtaacagatacgaagactatagatctctcattataaaaagtgatcacgagtttgtaaagctatgtaaaaatcatgcggagaaaagttctccagaaacgcaacaaatgattatcaaacacatatacgaacaatatcttattccagtatctgaagtactattaaaacctataatgtccatgggtgacataattacatataacggatgtaaagacaatgaatggatgctagaacaactctctaccctaaactttaacaatctccgcacatggaactcatgtagcataggcaatgtaacgcgtctgttttatacattttttagttatctgatgaaagataaactaaatatataagtataatcccattctaatactttaacctgatgtattagcatcttattagaatattaacctaactaaaagacataacataaaaactcattacatagttgataaaaagcggtaggatataaatattatggctgccaccgttccgcgttttgacgacgtgtacaaaaatgcacaaagaagaattctagatcaagaaacattttttagtagaggtctaagtagaccgttaatgaaaaacacatatctatttgataattacgcgtatggatggataccagaaactgcaatttggagtagtagatacgcaaacctagatgctagtgactattatcccatttcgttgggattacttaaaaagttcgagtttctcatgtctctatataaaggtcctattcccgtatatgaagaaaaagtaaatactgaattcatagccaatggatcgttctctggtagatacgtatcatatcttcgaaagttttctgcccttccaacaaacgagtttattagttttttgttactgacttccattccaatctataatatcttgttctggtttaaaaacacacagtttgatattactaaacacacattattcagatacgtctatacagataatgccaaacacctggcgttggctaggtatatgcatcaaacaggagactataagcctttgtttagtcgtctcaaagagaattatatatttaccggtcccgttccaataagtatcaaagatatagatcaccctaatcttagtagagcaagaagtccatccgattatgagacattagctaatattagtactatattgtactttaccaagtatgatccggtattaatgtttttattgttttacgtacctgggtattcaattactacaaaaattactccagccgtagaatatctaatggataaactgaatctaacaaagagcgacgtacaactgttgtaaattattttatgcttcgtaaaatgtaggttttgaaccaaacattctttcaaagaatgagatgcataaaactttattatccaatagattgactatttcggacgtcaatcgtttaaagtaaacttcgtaaaatattctttgatcactgccgagtttaaaacttctatcgataattgtctcatatgttttaatatttacaagttttttggtccatggtacattagccggacaaatatatgcaaaataatatcgttctccaagttctatagtttctggattatttttattatattcagtaactaaatacatattagggttatctgcggatttataatttgagtgatgcattctactcaacataaataattctagaggagacgatctactatcaaattcggatcgtaaatctgtttctaaagaacggagaatatctatacatacctgattagaattcatccgtccttcagacaacatctcagacagtctggttttgtacatcttaatcatattcttatgaaacttggaaacatctcttctagtttcactagtacctttattaattctctcaggtacagattttgaattcgacgatgctgagtatttcatcgttgtatatttcttcttcgattgcataatcagattcttatataccgcctcaaactctattttaaaattattaaacaatactctattattaatcagtcgttctaactctttcgctatttctatagacttatctacatcttgactgtctatctctgtaaacacggagtcggtatctccatacacgctacgaaaacgaaatctgtaatctataggcaacgatgttttcacaatcggattaatatctctatcgtccatataaaatggattacttaatggattggcaaaccgtaacataccgttagataactctgctccatttagtaccgattctagatacaagatcattctacgtcctatggatgtgcaactcttagccgaagcgtatgagtatagagcactatttctaaatcccatcagaccatatactgagttggctactatcttgtacgtatattgcatggaatcatagatggccttttcagttgaactggtagcctgttttagcatctttttatatctggctctctctgccaaaaatgttcttaatagtctaggaatggttccttctatcgatctatcgaaaattgctatttcagagatgaggttcggtagtctaggttcacaatgaaccgtaatatatctaggaggtggatatttctgaagcaatagctgattatttatttcttcttccaatctattggtactaacaacgacaccgactaatgtttccggagatagatttccaaagatacacacattaggatacagactgttataatcaaagattaatacattattactaaacattttttgttttggagcaaataccttaccgccttcataaggaaacttttgttttgtttctgatctaactaagatagttttagtttccaacaatagctttaacagtggacccttgatgactgtactcgctctatattcgaataccatggattgaggaagcacatatgttgacgcacccgcgtctgtttttgtttctactccataatactcccacaaatactgacacaaacaagcatcatgaatacagtatctagccatatctaaagctatgtttagattataatccttatacatctgagctaaatcaacgtcatcctttccgaaagataatttatatgtatcattaggtaaagtaggacataatagtacgactttaaatccattttcccaaatatctttacgaattactttacatataatatcctcatcaacagtcacataattacctgtggttaaaacctttgcaaatgcagcggctttgcctttcgcgtctgtagtatcgtcaccgatgaacgtcatttctctaactcctctatttaatactttacccatgcaactgaacgcgttcttggatatagaatccaatttgtacgaatccaatttttcaaatttttgaatgaatgaatatagatcgaaaaatatagttccattattgttattaacgtgaaacgtagtattggccatgccgcctactcccttatgactagactgatttctctcataaatacagagatgtacagcttcctttttgtccggagatctaaagataattttctctcctgttaataactctagacgattagtaatatatctcagatcaaagttatgtccgttaaaggtaacgacgtagtcgaacgttagttccaacaattgtttagctattcgtaacaaaactatttcagaacatagaactagttctcgttcgtaatccatttccattagtgactgtatcctcaaacatcctctatcgacggcttcttgtatttcctgttccgttaacatctcttcattaatgagcgtaaacaataatcgtttaccacttaaatcgatataacagtaacttgtatgcgagattgggttaataaatacagaaggaaacttcttatcgaagtgacactctatatctagaaataagtacgatcttgggatatcgaatctaggtatttttttagcgaaacagttacgtggatcgtcacaatgataacatccattgttaatctttgtcaaatattgctcgtccaacgagtaacatccgtctggagatatcccgttagaaatataaaaccaactaatattgagaaattcatccatggtggcattttgtatgctgcgtttctttggctcttctatcaaccacatatctgcgacggagcattttctatctttaatatctagattataacttattgtctcgtcaatgtctatagttctcatctttcccaacggcctcgcattaaatggaggaggagacaatgactgatatatttcgtccgtcactacgtaataaaagtaatgaggaaatcgtataaatacggtctcgccatttcgacatctggatttcagatataaaaatctgttttcaccgtgactttcaaaccaattaatgcaccgaacatccatttatagaatttagaaatatattttcatttaaatgaatcccaaacattggggaagagccgtatggaccattatttttatagtactttcgcaagcgggtttagacggcaacatagaagcgtgtaaacgaaaactatatactatagttagcactcttccatgtcctgcatgtagacggcacgcgactatcgctatagaggacaataatgtcatgtctagcgatgatctgaattatatttattattttttcatcagattatttaacaatttggcatctgatcccaaatacgcgatcgatgtgacaaaggttaaccctttataaacttaacccattataaaacttatgattagtcacaactgaaataaccgcgtgattattttttggtataattctacacggcatggtttctgtgactatgaattcaacccccgttacattagtgaaatctttaacaaacagcaagggttcgtcaaagacataaaactcattgtttacaatcgaaatagaccccctatcacacttaaaataaaaaatatccttatcctttaccaccaaataaaattctgattggtcaatgtgaatgtattcacttaacagttccacaaatttatttattaactccgaggcacatacatcgtcggtattttttatggcaaactttactcttccagcatccgtttctaaaaaaatattaacgagttccatttatatcatccaatattattgaaatgacgttgatggacagatgatacaaataagaaggtacggtacctttgtccaccatctcctccaattcatgctctattttgtcattaactttaatgtatgaaaacagtacgccacatgcttccatgacagtgtgtaacactttggatacaaaatgtttgacattagtataattgtccaagactgtcaatctataatagatagtagctataatatattctatgatggtattgaagaagatgacaaccttggcatattgatcatttaacacagacatggtatcaacagatagcttgaatgaaagagaatcagtaattggaataagcgtcttctcgatagagtgtccgtataccaacatgtctgatattttgatgtattccattaaattatttagttttttctttttattctcgttaaacagcatttctgtcaacggaccccaacatcgttgaccgattaagttttgattgatttttccgtgtaaggcgtatctagtcagatcgtatagcctatccaataatccatcgtctgtgtgtagatcacatcgtacactttttaattctctatagaagagcgacagacatctggagcaattacagacagcaatttctttattctctacagatgtaagatacttgaagacattcctatgatgatgcagaattttggataacacggtattgatggtatctgttaccataattcctttgatggctgatagtgtcagagcacaagatttccaatctttgacaatttttagcaccattatctttgttttgatatctatatcagacagcatggtgcgtctgacaacacagggattaagacggaaagatgaaatgattctctcaacatcttcaatagataccttgctattttttctggcattatctatatgtgcgagaatatcctctagagaatcagtatcctttttgatgatagtggatctcaatgacatgggacgtttaaaccttcttattctatcaccagattgcatggtgatttgtcttctttcttttatcataatgtaatctctaaattcatcggcaaattgtctatatctaaaatcataatatgagatgtttacctctacaaatatctgttcgtccaatgttagagtatttacatcagttttgtattccaaattaaacatggcaacggatttaattttatattcctctattaagtcctcgtcgataataacagaatgtagataatcatttaatccgtcgtacatggttggaagatgcttgttgacaaaatctttaattgtcttgatgaaggtgggactatatctaacatcttgattaataaaatttataacattgtccataggatactttgtaactagttttatacacatctcttcatcggtaagtttagacagaatatcgtgaacaggtggtatattatattcatcagatatacgaagaacaatgtccaaatctatattgtttaatatattatatagatgtagcgtagctcctacaggaatatctttaactaagtcaatgatttcatcaaccgttagatctattttaaagttaatcatataggcattgatttttaaaaggtatgtagccttgactacattctcattaattaaccattccaagtcattgtgtgtaagaagattatattctatcataagcttgactacatttggtcccgataccattaaagaattcttatgatataaggaaacagattttaggtactcatctactctacaagaattttggagagccttaacgatatcagtgacgtttattatttcaggaggaaagaatctaacattgagaatatcggaattaatagcttccagatacagtgattttggcaatagtccgtgtaatccataatccagtaacacgagctggtgcttgctagacaccttttcaatgtttaatttttttgaaataagctttgataaagccttcctcgcaaattccggatacatgaacatgtcggcgacatgattaagtattgttttttcattatttttatattttctcaacaagttctcaataccccaatagatgatagaatatcacccaatgcgtccatgttgtctatttccaacaggtcgctatatccaccaatagaagtttttccaaaaaagattctaggaacagttctaccaccagtaatttgttcaaaataatcccgcaattcattttcgggtttaaattctttaatatcgacaatttcatacgctcctcttttgaaactaaacttatttagaatatccagtgcatttctacaaaaaggacatgtatacttgacaaaaattgtcactttgttattggccaacctttgttgtacaaattcctcggccattttaatatttaagtgatataaaactatctcgacttatttaactctttagtcgagatatatggacgcagatagctatatgatagccaactacagaaggcaaacgctataaaaaacataattacgacgagcatatttataaatatttttattcagcattacttgatatagtaatattaggcacagtcaaacattcaaccactctcgatacattaactctctcattttctttaacaaattctgcaatatcttcgtaaaaagattcttgaaactttttagaatatctatcgactctagatgaaatagcgttcgtcaacatactatgttttgtatacataaaggcgcccattttaacagtttctagtgacaaaatgctagcgatcctaggatcctttagaatcacatagattgacgattcgtctctcttagtaactctagtaaaataatcatacaatctagtacgcgaaataatattatccttgacttgaggagatctaaacaatctagttttgagaacatcgataagttcatcgggaatgacatacatactatctttaatagaactcttttcatccagttgaatggattcgtccttaaccaactgattaatgagatcttctattttatcattttccagatgatatgtatgtccattaaagttaaattgtgtagcgcttctttttagtctagcagccaatactttaacatcactaatatcgatatacaaaggagatgatttatctatggcattaagaattcgtttttcgacatccgtcaaaaccaattcctttttgcctgtatcatccagttttccatcctttgtaaagaaattattttctactagactattaataagactgataaggattcctccataattgcacaatccaaactttttaacaaaactagactttacgagatctacaggaatgcgtacttcaggttttttagcttgtgattttttcttttgcggacattttctagtaaccaactcatctaccatttcattgattttagcagtgaaataagctttcaatgcacgggcactgatactattgaaaacgagttgatcttcaaattccgccatttaagttcaccaaacaacttttaaatacaaatatatcaatagtagtagaataagaactataaaaaaaataataattaaccaaccccaacaaccggtattattagttgatgtggtagttttctcatcacttagaacagatttaacaatttctataaagtctgtcaaatcatcttccggagaccccataaatacaccaaatatagcggcgtacaacttatccatttatacattgaatattggcttttctttatcgctatcttcatcatattcatcatcaatatcaacaagtcccagattacgagccagatcttcttctacattttcagtcattgatacacgttcactatctccagagagtccgataacgttagccaccacttctctatcaatgattagtttcttgagcgcgaaagtaatttttgtttccgttccggatctatagaagacgataggtgtgataattgccttggccaattgtctttctcttttactgagtgattctagttcaccttctatagatctgagaatggatgattctccagtcgaaacatattctaccatggatccgtttaatttgttgatgaagatggattcatccttaaatgttttctctgtaatagtttccaccgaaagactatgcaaagaatttggaatgcgttccttgtgcttaatgtttccatagacggcttctagaagttgatacaacataggactagccgcggtaacttttatttttagaaagtatccatcgcttctatcttgtttagatttatttttataaagtttagtctctccttccaacataataaaagtggaagtcatttgactagataaactatcagtaagttttatagagatagacgaacaattagcgtattgagaagcatttagtgtaacgtattcgatacattttgcattagatttactaatcgattttgcatactctataacacccgcacaagtctgtagagaatcgctagatgcagtaggtcttggtgaagtttcaactctcttcttgattaccttactcatgattaaacctaaataattgtactttgtaatataatgatatatattttcactttatctcatttgagaataaaaatgtttttgtttaaccactgcatgatgtacagatttcggaatcgcaaaccaccagtggttttattttatccttgtccaatgtgaattgaatgggagcggatgcgggtttcgtacgtagatagtacattcccgtttttagaccgagactccatccgtaaaaatgcatactcgttagtttggaataactcggatctgctatatggatattcatagattgactttgatcgatgaaggctcccctgtctgcagccatttttatgatcgtcttttgtggaatttcccaaatagttttataaactcgcttaatatcttctggaaggtttgtattctgaatggatccaccatctgccataatcctattcttgatctcatcattccataattttctctcggttaaaactctaaggagatgcggattaactacttgaaattctccagacaatactctccgagtgtaaatattactggtatacggttccaccgactcattatttcccaaaatttgagcagttgatgcagtcggcataggtgccaccaataaactatttctaagaccgtatgttctgattttatcttttagaggttcccaattccaaagatccgacggtacaacattccaaagatcatattgtagaataccgttactggcgtacgatcctacatatgtatcgtatggtccttccttctcagctagttcacaactcgcctctaatgcaccgtaataaatggtttcgaagatcttcttatttagatcttgtgcttccaggctatcaaatggataatttaagagaataaacgcgtccgctaatccttgaacaccaataccgataggtctatgtctcttattagagatttcagcttctggaataggataataattaatatctataattttattgagatttctgacaattactttgaccacatccttcagtttgagaaaatcaaatcgcccatctattacaaacatgttcaaggcaacagatgccagattacaaacggctacctcattagcatccgcatattgtattatctcagtgcaaagattactacacttgatagttcctaaattttgttgattactctttttgttacacgcatccttataaagaatgaatggagtaccagtttcaatctgagattctataatcgctttccagacgactcgagcctttattatagatttgtatctcctttctctttcgtatagtgtatacaatcgttcgaactcgtctccccaaacattgtccaatccaggacattcatccggacacatcaacgaccactctccgtcatccttcactcgtttcataaagagatcaggaatccaaagagctataaatagatctctggttctatgttcctcgtttcctgtattctttttaagatcgaggaacgccataatatcagaatgccacggttccaagtatatggccataactccaggccgtttgtttcctccctgatctatgtatctagcggtgttattataaactctcaacattggaataataccgtttgatataccattggtaccggagatatagcttccactggcacgaatattactaattgatagacctattccccctgccattttagagattaatgcgcatcgttttaacgtgtcatagataccctctatgctatcatcgatcatgttaagtagaaaacagctagacatttggtgacgactagttcccgcattaaataaggtaggagaagcgtgcgtaaaccatttttcagaaagtagattgtacgtctcaatagctgagtctatatcccattgatgaattcctactgcgacacgcattaacatgtgctgaggtctttcaacgatcttgttgtttattttcaacaagtaggatttttccaaagttttaaaaccaaaatagttgtatgaaaagtctcgttcgtaaataataaccgagttgagtttatccttatatttgttaactatatccatggtgatacttgaaataatcggagaatgtttcccatttttaggattaacatagttgaataaatcctccatcacttcactaaatagtttttttgtttccttgtgtagatttgatacggctattctggcggctagaatggcataatccggatgttgtgtagtacaagtggctgctatttcggctgccagagtgtccaattctaccgttgttactccattatatattccttgaataaccttcatagctattttaataggatctatatgatccgtgtttaagccataacataattttctaatacgagacgtgattttatcaaacatgacattttccttgtatccatttcgtttaatgacaaacatttttgttggtgtaataaaaaaattatttaacttttcattaatagggatttgacgtatgtagcgtacaaaatgattgttcctggtatatagataaagagtcctatatatttgaaaatcgttacggctcgattaaactttaatgattgcatagtgaatatatcattaggatttaactccttgactatcatggcggcgccagaaattaccatcaaaagcattaatacagttataccgatcgcagttagaacggttatagcatccaccatttatatctaaaaattagatcaaagaatatgtgacaaagtcctagttgtatactgagaattgacgaaacaatgtttcttacatatttttttcttattagtaaccgacttaatagtaggaactggaaaactagacttgattattctataagtatagatacccttccaaataatattctctttgataaaagttccagaaaatgtagaattttttaaaaagttatcttttgctattaccaagattgtgtttagacgcttattattaatatgagtgatgaaatccacaccgcctctagatatcgcctttatttccacattagatggtaaatccaatagtgaaactatctttttaggaatgtatggactcgcgtttagaggagtaaacgtcttaggcgtcggaaaggatgattcatcaaacgaataaacaatttcacaaatggatgttaatgtattagtaggaaattttttgacgctattggaattgaagattctaatggatgatgttctacctatttcatccgataacatgttaatttccgacaccaacggttttaatatttcgatgatatacggtagtctctctttcggacttatatagcttattccacaatacgagtcattatatactccaaaaaacaaaataactagtataaaatctgtatcgaatgggaaaaacgaaattatcgacataggtatagaatccggaacattgaacgtattaatacttaattctttttctgtggtaagtaccgataggttattgacattgtatggttttaaatattctataacttgagacttgatagatattagtgatgaattgaaaattatttttatcaccacgtgtgtttcaggatcatcgtcgacgcccgtcaaccaaccgaacggagtaaaataaatatcattaatatatgctctagatattagtatttttatcaatcctttgattatcatcttctcgtaggcgaatgattccatgatcaagagtgatttaagaacatcctccggagtattaatgggcttagtaaacagtccatcgttgcaataataaaagttatccaagttaaaggatattatgcattcgtttaaagatatcacctcatctgacggagacaattttttggtaggttttagagactttgaagctacttgtttaacaaagttattcatcgtcgtctactattctatttaattttgtagttaatttatcacatatcacattaattgactttttggtccacttttccatacgtttatattcttttaatcctgcgttatccgtttccgttatatccagggatagatcttgcaagttaaatagaatgctcttaaataatgtcattttcttatccgctaaaaatttaaagaatgtataaacctttttcagagatttgaaactcttaggtggtgtcctagtacacaatatcataaacaaactaataaacattccacattcagattccaacagctgattaacttccacattaatacagcctattttcgctccaaatgtacattcgaaaaatctgaataaaacatcgatgtcacaatttgtattatccaatacagaatgtttgtgattcgtgttaaaaccatcggagaaggaatagaaataaaaattattatagtggtggaattcagttggaatattgcctccggagtcataaaaggatactaaacattgttttttatcataaattacacatttccaatgagacaaataacaaaatccaaacattacaaatctagaggtagaacttttaattttgtctttaagtatatacgataagatatgtttattcataaacgcgtcaaatttttcatgaatcgctaaggagtttaagaatctcatgtcaaattgtcctatataatccacttcggatccataagcaaactgagagactaagttcttaatacttcgattgctcatccaggctcctctctcaggctctattttcatcttgacgacctttggattttcaccagtatgtattcctttacgtgataaatcatcgattttcaaatccatttgtgagaagtctatcgccttagatactttttcccgtagtcgaggtttaaaaaaatacgctaacggtatactagtaggtaactcaaagacatcatatatagaatggtaacgcgtctttaactcgtcggttaactctttcttttgatcgagttcgtcgctactattgggtctgctcaggtgccccgactctactagttccaacatcataccgataggaatacaagacactttgccggcggttgtagatttatcatatttttccactacatatccgttacaatttgttaaaaatttagatacatctatattgctacataatccagctagtgaatatatatgacataataaattggtaaatcctagttctggtattttactaattactaaatctgtatatctttccatttatcatggaaaagaatttaccagatatcttcttttttccaaactgcgttaatgtattctcttacaaatattcacaagatgaattcagtaatatgagtaaaacggaacgtgatagtttctcattggccgtgtttccagttataaaacatagatggcataacgcacacgttgtaaaacataaaggaatatacaaagttagtacagaagcacgtggaaaaaaagtatctcctccatcactaggaaaacccgcacacataaacctaaccgcgaagcaatatatatacagtgaacacacaataagctttgaatgttatagttttctaaaatgtataacaaatacagaaatcaattcgttcgatgagtatatattaagaggactattagaagctggtaatagtttacagatattttccaattccgtaggtaaacgaacagatactataggtgtactagggaataagtatccatttagcaaaattccattggcctcattaactcctaaagcacaacgagagatattttcagcgtggatttctcatagacctgtagttttaactggaggaactggagtgggtaagacgtcacaggtacccaagttattgctttggtttaattatttatttggtggattctctactctagataaaatcactgactttcacgaaagaccagtcattctatctcttcctaggatagctttagttagattgcatagcaataccattttaaaatcattgggatttaaggtactagatggatctcctatttctttacggtacggatctataccggaagaattaataaacaaacaaccaaaaaaatatggaattgtattttctacccataagttatctctaacaaaactatttagttatggcactcttattatagacgaagttcatgagcatgatcaaataggagatattattatagcagtagcgagaaagcatcatacgaaaatagattctatgtttttaatgactgccacgttagaggatgacagggaacggctaaaagtatttttacctaatcccgcatttatacatattcctggagatacactgtttaaaattagcgaggtatttattcataataagataaatccatcttccagaatggcatacatagaagaagaaaagagaaatttagttactgctatacagatgtatactcctcctgatggatcatccggtatagtctttgtggcatccgttgcacagtgtcacgaatataaatcatatttagaaaaaagattaccgtatgatatgtatattattcatggtaaggtcttagatatagacgaaatattagaaaaagtgtattcatcacctaatgtatcgataattatttctactccttatttggaatccagcgttactatacgcaatgttacacacatttatgatatgggtagagtttttgtccccgctccttttggaggatcgcaacaatttatttctaaatctatgagagatcaacgaaaaggaagagtaggaagagttaatcctggtacatacgtctatttctatgatctgtcttatatgaagtctatacagcgaatagattcagaatttctacataattatatattgtacgctaataagtttaatctaacactccccgaagatttgtttataatccctacaaatttggatattctatggcgtacaaaggaatatatagactcgttcgatattagtacagaaacatggaataaattattatccaattattatatgaagatgatagagtatgctaaactttatgtactaagtcctattctcgctgaggagttggataactttgagaggacgggagaattaactagtattgtacgagaagccattttatctctaaatttacaaattaagattttaaattttaaacataaagatgatgatacgtatatacacttttgtaaaatattattcggtgtctataacggaacaaacgctactatatattatcatagacctctaacgggatatatgaatatgatttcagatactatatttgttcctgtagataataactaaaaatcaaactctaatgaccacatctttttttagagatgaaaaattttccacatctccttttgtagacacgactaaacattttgcagaaaaaagtttattagtgtttagataatcgtatacttcatcagtgtagatagtaaatgtgaacagataaaaggtattcttgctcaatagattggtaaattccatagaatatattaatcctttcttcttgagatcccacatcatttcaaccagagacgttttatccaatgatttacctcgtactataccacatacaaaactagattttgcagtgacgtcgtacctggtattcctaccaaacaaaattttacttttagttcttttagaaaattctaaggtagaatctctatttgccaatatgtcatctatggaattaccactagcaaaaaatgatagaaatatatattgatacatcgcagctggttttgatctactatactttaaaaacgaatcagattccataattgcctgtatatcatcagctgaaaaactatgttttacacgtattccttcggcatttctttttaatgatatatcttgtttagacaatgataaagttatcatgtccatgagagacgcgtctccgtatcgtataaatatttcattagatgttagacgcttcattaggggtatacttctataaggtttcttaatcagtccatcattggttgcgtcaagaactactatcggatgttgttgggtatctctagtgttacacatggccttactaaagtttgggtaaataactatgatatctctattaattatagatgcatatatttcattcgtcaaggatattagtatcgacttgctatcgtcattaatacgtgtaatgtaatcatataaatcatgcgatagccaaggaaaatttaaatagatgttcatcatataatcgtcgctataattcatattaatacgttgacattgactaatttgtaatatagcctcgccacgaagaaagctctcgtattcagtttcatcgataaaggataccgttaaatataactggttgccgatagtctcatagtctattaagtggtaagtttcgtacaaatacagaatccctaaaatattatctaatgttggattaatctttaccataactgtataaaatggagacggagtcataactattttaccgtttgtacttactggaatagatgaaggaataatctccggacatgctggtaaagacccaaatgtctgtttgaagaaatccaatgttccaggtcctaatctcttaacaaaaattacgatattcgatcccgatatcctttgcattctatttaccagcatatcacgaactatattaagattatctatcatgtctattctcccaccgttatataaatcgcctccgctaagaaacgttagtatatccatacaatggaatacttcatttctaaaatagtattcgttttctaattctttaatgtgaaatcgtatactagaaagggaaaaattatctttgagttttccgttagaaaagaaccacgaaactaatgttctgattgcgtccgattccgttgctgaattaatggatttacaccaaaaactcatataacttctagatgtagaagcattcgctaaaaaattagtagaatcaaaggatataagtagatgttccaacaagtgagcaattcccaagatttcatctatatcattctcgaatccgaaattagaaattcccaagtagatatcctttttcatccgatcgttgatgaaaatacgaactttattcggtaagacaatcatttactaaggagtaaaataggaagtaatgttcgtatgtcgttatcatcgtataaattaaaggtgtgttttttaccattaagtgacattataattttaccaatattggaattataatataggtgtatttgcgcactcgcgacggttgatgcatcggtaaatatagctgtatctaatgttctagtcggtatttcatcatttcgctgtctaataatagcgttttctctatctgtttccattacagctgcctgaagtttattggtcggataatatgtaaaataataagaaatacatacgaataacaaaaataaaataagatataataaagatgccatttagagatctaattttgtttaacttgtccaaattcctacttacagaagatgaggaatcgttggagatagtgtcttccttatgtagaggatttgaaatatcttataatgacttgataacttactttccagataggaaataccataaatatatttataaagtatttgaacatgtagatttatcggaggaattaagtatggaattccatgatacaactctgagagatttagtctatcttagattgtacaagtattccaagtgtatacggccgtgttataaattaggagataatctaaaaggcatagttgttataaaggacaggaatatttatattagggaagcaaatgatgacttgatagaatatctcctcaaggaatacactcctcagatttatacatattctaatgagcgcgtccccataactggttcaaaattaattctttgtggattttctcaagttacatttatggcgtatacaacgtcgcatataacaacaaataaaaaggtagatgttctcgtttccaaaaaatgtatagatgaactagtcgatccaataaattatcaaatacttcaaaatttatttgataaaggaagcggaacaataaacaaaatactcaggaagatattttattcggtaacaggtggccaaactccataggtagctttttctatttcggattttagaatttccaaattcaccagcgatttatcggttttggtgaaatccaaggatttattaatgtccacaaatgccatttgttttgtctgtggattgtatttgaaaatggaaacgatgtagttagatagatgcgctgcgaagtttcctattagggttccgcgcttcacgtcacccagcatacttgaatcaccatcctttaaaaaaaatgataagatatcaacatggagtatatcatactcgaattttaattcttctactgactcactgacattttcacaaatactacaatacggtttaccgaaaataatcagtacgttcttcatttatgggtatcaaaaacttaaaatcgttactgctggaaaataaatcactgacgatattagatgataatttatacaaagtatacaatggaatatttgtggatacaatgagtatttatatagccgtcgccaattgtgtcagaaacttagaagagttaactacggtattcataaaatacgtaaacggatgggtaaaaaagggagggcatgtaaccctttttatcgatagaggaagtataaaaattaaacaagacgttagagacaagagacgtaaatattctaaattaaccaaggacagaaaaatgttagaattagaaaagtgtacatccgaaatacaaaatgttaccggatttatggaagaagaaataaaggcagaaatgcaattaaaaatcgataaactcacatttcaaatatatttatctgattctgataacataaaaatatcattgaatgagatactaacacatttcaacaataatgagaatgttacattattttattgtgatgaacgagacgcagaattcgttatgtgtctcgaggctaaaacacatttctctaccacaggagaatggccgttgataataagtaccgatcaggatactatgctatttgcatctgctgataatcatcctaagatgataaaaaacttaactcaactgtttaaatttgttccctcggcagaggataactatttagcaaaattaacggcgttagtgaatggatgtgatttctttcctggactctatggggcatctataacacccaccaacttaaacaaaatacaattgtttagtgattttacaatcgataatatagtcactagtttggcaattaaaaattattatagaaagactaactctaccgtagacgtgcgtaatattgttacgtttataaacgattacgctaatttagacgatgtctactcgtatattcctccttgtcaatgcactgttcaagaatttatattttccgcattagatgaaaaatggaatgaatttaaatcatcttatttagaaagcgtgccgttaccctgccaattaatgtacgcgttagaaccacgcaaggagattgatgtttcagaagttaaaactttatcatcttatatagatttcgaaaatactaaatcagatatcgatgttataaaatctatatcctcgatcttcggatattctaacgaaaactgtaacacgatagtattcggcatctataaggataatttactactgagtataaataattcattttactttaacgatagtctgttaataaccaatactaaaagtgataatataataaatataggttactagattaaaaatggtgttccaactcgtgtgctctacatgcggtaaagatatttctcacgaacgatataaattgattatacgaaaaaaatcattaaaggatgtactcgtcagtgtaaagaacgaatgttgtaggttaaaattatctacacaaatagaacctcaacgtaacttaacagtgcaacctctattggatataaactaatatggatccggttaattttatcaagacatatgcgcctagaggttctattatttttattaattataccatgtcattaacaagtcatttgaatccatcgatagaaaaacatgtgggtatttattatggtacgttattatcggaacacttggtagttgaatctacctatagaaaaggagttcgaatagtcccattggatagtttttttgaaggatatcttagtgcaaaagtatacatgttagagaatattcaagttatgaaaatagcagctgatacgtcattaactttattgggtattccgtatggatttggtcatgatagaatgtattgttttaaattggtagctgactgttataaaaatgccggtattgatacatcgtctaaacgaatattgggcaaagatatttttctgagccaaaacttcacagacgataatagatggataaagatatatgattctaataatttaacattttggcaaattgattaccttaaagggtgagttaatatgcataactactcctccgttgttttttccctcgttctttttcttaacgttgtttgccatcactctcataatgtaaagatattctaaaatggtaaacttttgcatatcggacgcagaaattggtataaatgttgtaattgtattatttcccgtcaatggactagtcacagctccatcagttttatatcctttagagtatttctcactcgtgtctaacattctagagcattccatgatctgtttatcgttgatattggccggaaagatagattttttattttttattatattactattggcaattgtagatataacttctggtaaatatttttctaccttttcaatctcttctattttcaagccggctatatattctgctatattgttgctagtatcaataccttttctggctaagaagtcatatgtggtattcactatatcagttttaactggtagttccattagcctttccacttctgcagaataatcagaaattggttctttaccagaaaatccagctactataataggctcaccgatgatcattggcaaaatcctatattgtaccagattaatgagagcatatttcatttccaataattctgctagttcttgagacattgatttatttgatgaatctagttggttctctagatactctaccatttctgccgcatacaataacttgttagataaaatcagggttatcaaagtgtttagcgtggctagaatagtgggcttgcatgtattaaagaatgcggtagtatgagtaaaccgttttaacgaattatatagtctccagaaatctgtggcgttacatacatgagccgaatgacatcgaagattgtccaatatttttaatagctgctctttgtccattatttctatatttgactcgcaacaattgtagataccattaatcaccgattcctttttcgatgccggacaatagcacaattgtttagctttggactctatgtattcagaattaatagatatatctctcaatacagattgcactatacattttgaaactatgtcaaaaattgtagaacgacgctgttctgcagccatttaactttaaataatttacaaaaatttaaaatgagcatccgtataaaaatcgataaactgcgccaaattgtggcatatttttcagagttcagtgaagaagtgtctataaatgtagactcgacggatgagttaatgtatatttttgccgccttgggcggatctgtaaacatttgggcaattatacctctaagtgcatcagtgttttaccgaggagccgaaaatattgtgtttaatcttcctgtgtccaaggtaaaatcgtgtttgtgtagttttcacaatgatgccatcatagatatagaacctgatctggaaaataatctagtaaaactttctagttatcatgtagtaagtgtcgattgtaacaaggaactgatgcctattaggacagatactactatttgtctaagtatagatcaaaagaaatcttacgtgtttaattttcacaagtatgaagaaaaatgttgtggtagaaccgtcattcatctagaatggttgttgggctttatcaagtgtattagtcagcatcagcatctggctattatgtttaaagatgacaatattattatgaagactcctggtaatactgatgcgttttccagggaatattctatgactgaatgttctcaagaactacaaaagttttctttcaaaatagctatctcgtctctcaacaaactacgaggattcaaaaagagagtcaatgtttttgaaactagaatcgtaatggataatgacgataacattttaggaatgttgttttcggatagagttcaatcctttaagatcaacatctttatggcgtttttagattaatactttcaatgagataaatatgggtggcggagtaagtgttgagctccctaaacgggatccgcctccgggagtacccactgatgagatgttattaaacgtggataaaatgcatgacgtgatagctcccgctaagcttttagaatatgtgcatataggaccactagcaaaagataaagaggataaagtaaagaaaagatatccagagtttagattagtcaacacaggacccggtggtctttcggcattgttaagacaatcgtataatggaaccgcacccaattgctgtcgcacttttaatcgtactcattattggaagaaggatggaaagatatcagataagtatgaagagggtgcagtattagaatcgtgttggccagacgttcacgacactggaaaatgcgatgttgatttattcgactggtgtcagggggatacgttcgatagaaacatatgccatcagtggatcggttcagcctttaataggagtaatagaactgtagagggtcaacaatcgttaataaatctgtataataagatgcaaacattatgtagtaaagatgctagtgtaccaatatgcgaatcatttttgcattatttacgcgcacacaatacagaagatagcaaagagatgatcgattatattctaagacaacagtctgcggactttaaacagaaatatatgagatgtagttatcccactagagataagttagaagagtcattaaaatatgcggaacctcgagaatgttgggatccagagtgttcgaatgccaatgttaatttcttactaacacgtaattataataatttaggactttgcaatattgtacgatgtaataccagcgtgaacaacttacagatggataaaacttcctcattaagattgtcatgtggattaagcaatagtgatagattttctactgttcccgtcaatagagcaaaagtagttcaacataatattaaacactcgttcgacctaaaattgcatttgatcagtttattatctctcttggtaatatggatactaattgtagctatttaaatgggtgccgcggcaagcatacagacgacggtgaatacactcagcgaacgtatctcgtctaaattagaacaagaagcgaacgctagtgctcaaacaaaatgtgatatagaaatcggaaatttttatatccgacaaaaccatggatgtaacctcactgttaaaaatatgtgctctgcggacgcggatgctcagttggatgctgtgttatcagccgctacagaaacatatagtggattaacaccggaacaaaaagcatacgtgccagctatgtttactgctgcgttaaacattcagacgagtgtaaacactgttgttagagattttgaaaattatgtgaaacagacttgtaattctagcgcggtcgtcgataacaaattaaagatacaaaacgtaatcatagatgaatgttacggagccccaggatctccaacaaatttggaatttattaatacaggatctagcaaaggaaattgtgccattaaagcgttgatgcaattgacgactaaggccactactcaaatagcacctagacaagttgctggtacaggagttcagttttatatgattgttatcggtgttataatattggcagcgttgtttatgtactatgccaagcgtatgttgttcacatccaccaatgataaaatcaaacttattttagccaataaggaaaacgtccattggactacttacatggacacattctttagaacttctccgatggttattgctaccacggatatgcaaaactgaaaatatattgataatattttaatagattaacatggaagttatcgctgatcgtctagacgatatagtgaaacaaaatatagcggatgaaaaatttgtagattttgttatacacggtctagagcatcaatgtcctgctatacttcgaccattaattaggttgtttattgatatactattatttgttatagtaatttatatttttacggtacgtctagtaagtagaaattatcaaatgttgttggtggtgctagtcatcacattaactattttttattactttatactataatagtactagactgacttctaacaaacatctcacctgccataaataaatgcttgatattaaagtcttctatttctaacactattccatctgtggaaaataatactctgacattatcgctaattgacacatcggtgagtgatatgcctataaagtaataatcttctttgggcacatataccagtgtaccaggttctaacaacctatttactggtgctcctgtagcatactttttctttaccttgagaatatccatcgtttgcttggtcaatagcgatatgtgattttttatcaaccactcaaaaaagtaattggagtgttcatatcctctacgggctattgtctcatggccgtgtatgaaatttaagtaacacgactgtggtagatttgttctatagagccgattgccgcaaatagatagaactaccaatatgtctgtacaaatgttaaacattaattgattaacagaaaaaacaatgttcgttctgggaatagaaaccagatcaaaacaaaattcgttagaatatatgccacgtttatacatggaatataaaataactacagtttgaaaaataacagtatcatttaaacatttaacttgcggggttaatctcacaactttactgtttttgaactgttcaaaatatagcatcgatccgtgagaaatacgtttagccgcctttaatagaggaaatcccaccgcctttctggatctcaccaacgacgatagttctgaccagcaactcatttcttcatcatccacctgttttaacatataataggcaggagatagatatccgtcattgcaatattccttctcgtaggcacacaatctaatattgataaaatctccattctcttctctgcatttattatcttgtctcggtggctgattaggctgtggtcttggtttaggccttggtctatcgttgttgaatctattttggtcattaaatctttcatttcttcctggtatatttctatcacctcgtttggttggatttttgtctatattatcgtttgtaacatcggtacgggtattcatttatcacaaaaaaaacttctctaaatgagtctactgctagaaaacctcatcgaagaagataccatattttttgcaggaagtatatctgagtatgatgatttacaaatggttattgccggcgcaaaatccaaatttccaagatctatgctttctatttttaatatagtacctagaacgatgtcaaaatatgagttggagttgattcataacgaaaatatcacaggagcaatgtttaccacaatgtataatataagaaacaatttgggtctaggagatgataaactaactattgaagccattgaaaactatttcttggatcctaacaatgaagttatgcctcttattattaataatacggatatgactgccgtcattcctaaaaaaagtggtaggagaaagaataagaacatggttatcttccgtcaaggatcatcacctatcttgtgcattttcgaaactcgtaaaaagattaatatttataaagaaaatatggaatccgcgtcgactgagtatacacctatcggagacaacaaggctttgatatctaaatatgcgggaattaatgtcctgaatgtgtattctccttccacatccataagattgaatgccatttacggattcaccaataaaaataaactagagaaacttagtactaataaggaactagaatcgtatagttctagccctcttcaagaacccattaggttaaatgattttctgggactattggaatgtgttaaaaagaatattcctctaacagatattccgacaaaggattgattactataaatggagaatgttcctaatgtatactttaatcctgtgtttatagagcccacgtttaaacattctttattaagtgtttataaacacagattaatagttttatttgaagtattcgttgtattcattctaatatatgtattttttagatctgaattaaatatgttcttcatgcctaaacgaaaaatacccgatcctattgatagattacgacgtgctaatctagcgtgtgaagacgataaattaatgatctatggattaccatggatgacaactcaaacatctgcgttatcaataaatagtaaaccgatagtgtataaagattgtgcaaagcttttgcgatcaataaatggatcacaaccagtatctcttaacgatgttcttcgcagatgatgattcattttttaagtatttggctagtcaagatgatgaatcttcattatctgatatattgcaaatcactcaatatctagactttctgttattattattgatccaatcaaaaaataaattagaagctgtgggtcattgttatgaatctctttcagaggaatacagacaattgacaaaattcacagactttcaagattttaaaaaactgtttaacaaggtccctattgttacagatggaagggtcaaacttaataaaggatatttgttcgactttgtgattagtttgatgcgattcaaaaaagaatcctctctagctaccaccgcaatagatcctgttagatacatagatcctcgtcgcaatatcgcattttctaacgtgatggatatattaaagtcgaataaagtgaacaataattaattctttattgtcatcatgaacggcggacatattcagttgataatcggccccatgttttcaggtaaaagtacagaattaattagacgagttagacgttatcaaatagctcaatataaatgcgtgactataaaatattctaacgataatagatacggaacgggactatggacgcatgataagaataattttgaagcattggaagcaactaaactatgtgatgtcttggaatcaattacagatttctccgtgataggtatcgatgaaggacagttctttccagacattgttgaattagatcgataaaaattaattaattacccgggtaccaggcctagatctgtcgagatccggtggtggtgcaaatcaaagaactgctcctcagtggatgttgcctttacttctaggcctgtacggaagtgttacttctgctctaaaagctgctgcagggggggggggggggtgggggggccggttagggccgccatcccctcagagcgtcgggatatcgggtggcggctcgggacggaggacgcgctagtgttcttctgtgtggcagttcagaatgatggatcaagctagatcagcattctctaacttgtttggtggagaaccattgtcatatacccggttcagcctggctcggcaagtagatggcgataacagtcatgtggagatgaaacttgctgtagatgaagaagaaaatgctgacaataacacaaaggccaatgtcacaaaaccaaaaaggtgtagtggaagtatctgctatgggactattgctgtgatcgtctttttcttgattggatttatgattggctacttgggctattgtaaaggggtagaaccaaaaactgagtgtgagagactggcaggaaccgagtctccagtgagggaggagccaggagaggacttccctgcagcacgtcgcttatattgggatgacctgaagagaaagttgtcggagaaactggacagcacagacttcaccagcaccatcaagctgctgaatgaaaattcatatgtccctcgtgaggctggatctcaaaaagatgaaaatcttgcgttgtatgttgaaaatcaatttcgtgaatttaaactcagcaaagtctggcgtgatcaacattttgttaagattcaggtcaaagacagcgctcaaaactcggtgatcatagttgataagaacggtagacttgtttacctggtggagaatcctgggggttatgtggcgtatagtaaggctgcaacagttactggtaaactggtccatgctaattttggtactaaaaaagattttgaggatttatacactcctgtgaatggatctatagtgattgtcagagcagggaaaatcacctttgcagaaaaggttgcaaatgctgaaagcttaaatgcaattggtgtgttgatatacatggaccagactaaatttcccattgttaacgcagaactttcattctttggacatgctcatctggggacaggtgacccttacacacctggattcccttccttcaatcacactcagtttccaccatctcggtcatcaggattgcctaatatacctgtccagacaatctccagagctgctgcagaaaagctgtttgggaatatggaaggagactgtccctctgactggaaaacagactctacatgtaggatggtaacctcagaaagcaagaatgtgaagctcactgtgagcaatgtgctgaaagagataaaaattcttaacatctttggagttattaaaggctttgtagaaccagatcactatgttgtagttggggcccagagagatgcatggggccctggagctgcaaaatccggtgtaggcacagctctcctattgaaacttgcccagatgttctcagatatggtcttaaaagatgggtttcagcccagcagaagcattatctttgccagttggagtgctggagactttggatcggttggtgccactgaatggctagagggatacctttcgtccctgcatttaaaggctttcacttatattaatctggataaagcggttcttggtaccagcaacttcaaggtttctgccagcccactgttgtatacgcttattgagaaaacaatgcaaaatgtgaagcatccggttactgggcaatttctatatcaggacagcaactgggccagcaaagttgagaaactcactttagacaatgctgctttccctttccttgcatattctggaatcccagcagtttctttctgtttttgcgaggacacagattatccttatttgggtaccaccatggacacctataaggaactgattgagaggattcctgagttgaacaaagtggcacgagcagctgcagaggtcgctggtcagttcgtgattaaactaacccatgatgttgaattgaacctggactatgagaggtacaacagccaactgctttcatttgtgagggatctgaaccaatacagagcagacataaaggaaatgggcctgagtttacagtggctgtattctgctcgtggagacttcttccgtgctacttccagactaacaacagatttcgggaatgctgagaaaacagacagatttgtcatgaagaaactcaatgatcgtgtcatgagagtggagtatcacttcctctctccctacgtatctccaaaagagtctcctttccgacatgtcttctggggctccggctctcacacgctgccagctttactggagaacttgaaactgcgtaaacaaaataacggtgcttttaatgaaacgctgttcagaaaccagttggctctagctacttggactattcagggagctgcaaatgccctctctggtgacgtttgggacattgacaatgagttttaaatgtgatacccatagcttccatgagaacagcagggtagtctggtttctagacttgtgctgatcgtgctaaattttcagtagggctacaaaacctgatgttaaaattccatcccatcatcttggtactactagatgtctttaggcagcagcttttaatacagggtagataacctgtacttcaagttaaagtgaataaccacttaaaaaatgtccatgatggaatattcccctatctctagaattttaagtgctttgtaatgggaactgcctctttcctgttgttgttaatgaaaatgtcagaaaccagttatgtgaatgatctctctgaatcctaagggctggtctctgctgaaggttgtaagtggtcgcttactttgagtgatcctccaacttcatttgatgctaaataggagataccaggttgaaagaccttctccaaatgagatctaagcctttccataaggaatgtagctggtttcctcattcctgaaagaaacagttaactttcagaagagatgggcttgttttcttgccaatgaggtctgaaatggaggtccttctgctggataaaatgaggttcaactgttgattgcaggaataaggccttaatatgttaacctcagtgtcatttatgaaaagaggggaccagaagccaaagacttagtatattttcttttcctctgtcccttcccccataagcctccatttagttctttgttatttttgtttcttccaaagcacattgaaagagaaccagtttcaggtgtttagttgcagactcagtttgtcagactttaaagaataatatgctgccaaattttggccaaagtgttaatcttaggggagagctttctgtccttttggcactgagatatttattgtttatttatcagtgacagagttcactataaatggtgtttttttaatagaatataattatcggaagcagtgccttccataattatgacagttatactgtcggttttttttaaataaaagcagcatctgctaataaaacccaacagatactggaagttttgcatttatggtcaacacttaagggttttagaaaacagccgtcagccaaatgtaattgaataaagttgaagctaagatttagagatgaattaaatttaattaggggttgctaagaagcgagcactgaccagataagaatgctggttttcctaaatgcagtgaattgtgaccaagttataaatcaatgtcacttaaaggctgtggtagtactcctgcaaaattttatagctcagtttatccaaggtgtaactctaattcccattttgcaaaatttccagtacctttgtcacaatcctaacacattatcgggagcagtatcttccataatgtataaagaacaaggtagtttttacctaccacagtgtctgtatcggagacagtgatctccatatgttacactaagggtgtaagtaattatcgggaacagtgtttcccataattttcttcatgcaatgacatcttcaaagcttgaagatcgttagtatctaacatgtatcccaactcctataattccctatcttttagttttagttgcagaaacattttgtggtcattaagcattgggtgggtaaattcaaccactgtaaaatgaaattactacaaaatttgaaatttagcttgggtttttgttacctttatggtttctccaggtcctctacttaatgagatagtagcatacatttataatgtttgctattgacaagtcattttaactttatcacattatttgcatgttacctcctataaacttagtgcggacaagttttaatccagaattgaccttttgacttaaagcagagggactttgtatagaaggtttgggggctgtggggaaggagagtcccctgaaggtctgacacgtctgcctacccattcgtggtgatcaattaaatgtaggtatgaataagttcgaagctccgtgagtgaaccatcattataaacgtgatgatcagctgtttgtcatagggcagttggaaacggcctcctagggaaaagttcatagggtctcttcaggttcttagtgtcacttacctagatttacagcctcacttgaatgtgtcactactcacagtctctttaatcttcagttttatctttaatctcctcttttatcttggactgacatttagcgtagctaagtgaaaaggtcatagctgagattcctggttcgggtgttacgcacacgtacttaaatgaaagcatgtggcatgttcatcgtataacacaatatgaatacagggcatgcattttgcagcagtgagtctcttcagaaaacccttttctacagttagggttgagttacttcctatcaagccagtacgtgctaacaggctcaatattcctgaatgaaatatcagactagtgacaagctcctggtcttgagatgtcttctcgttaaggagatgggccttttggaggtaaaggataaaatgaatgagttctgtcatgattcactattctagaacttgcatgacctttactgtgttagctctttgaatgttcttgaaattttagactttctttgtaaacaaatgatatgtccttatcattgtataaaagctgttatgtgcaacagtgtggagattccttgtctgatttaataaaatacttaaacactgaaaaaaaaaaaaaaaaaaaaaaaaaaaaaaaaaaaaaaaaaaaaaaaaaaaaaaaaaaaaaaaaaaaaaaaaaaaaaaaaagtaccttctgaggcggaaagaaccagccggatctcgacttcgagcttatttatattccaaaaaaaaaaaataaaatttcaatttttaagctttcactaattccaaacccacccgctttttatagtaagtttttcacccataaataataaatacaataattaatttctcgtaaaagtagaaaatatattctaatttattgcacggtaaggaagtagatcataactcgagcatgggagatcccgtcgttttacaacgtcgtgactgggaaaaccctggcgttacccaacttaatcgccttgcagcacatccccctttcgccagctggcgtaatagcgaagaggcccgcaccgatcgcccttcccaacagttgcgcagcctgaatggcgaatggcgctttgcctggtttccggcaccagaagcggtgccggaaagctggctggagtgcgatcttcctgaggccgatactgtcgtcgtcccctcaaactggcagatgcacggttacgatgcgcccatctacaccaacgtgacctatcccattacggtcaatccgccgtttgttcccacggagaatccgacgggttgttactcgctcacatttaatgttgatgaaagctggctacaggaaggccagacgcgaattatttttgatggcgttaactcggcgtttcatctgtggtgcaacgggcgctgggtcggttacggccaggacagtcgtttgccgtctgaatttgacctgagcgcatttttacgcgccggagaaaaccgcctcgcggtgatggtgctgcgctggagtgacggcagttatctggaagatcaggatatgtggcggatgagcggcattttccgtgacgtctcgttgctgcataaaccgactacacaaatcagcgatttccatgttgccactcgctttaatgatgatttcagccgcgctgtactggaggctgaagttcagatgtgcggcgagttgcgtgactacctacgggtaacagtttctttatggcagggtgaaacgcaggtcgccagcggcaccgcgcctttcggcggtgaaattatcgatgagcgtggtggttatgccgatcgcgtcacactacgtctgaacgtcgaaaacccgaaactgtggagcgccgaaatcccgaatctctatcgtgcggtggttgaactgcacaccgccgacggcacgctgattgaagcagaagcctgcgatgtcggtttccgcgaggtgcggattgaaaatggtctgctgctgctgaacggcaagccgttgctgattcgaggcgttaaccgtcacgagcatcatcctctgcatggtcaggtcatggatgagcagacgatggtgcaggatatcctgctgatgaagcagaacaactttaacgccgtgcgctgttcgcattatccgaaccatccgctgtggtacacgctgtgcgaccgctacggcctgtatgtggtggatgaagccaatattgaaacccacggcatggtgccaatgaatcgtctgaccgatgatccgcgctggctaccggcgatgagcgaacgcgtaacgcgaatggtgcagcgcgatcgtaatcacccgagtgtgatcatctggtcgctggggaatgaatcaggccacggcgctaatcacgacgcgctgtatcgctggatcaaatctgtcgatccttcccgcccggtgcagtatgaaggcggcggagccgacaccacggccaccgatattatttgcccgatgtacgcgcgcgtggatgaagaccagcccttcccggctgtgccgaaatggtccatcaaaaaatggctttcgctacctggagagacgcgcccgctgatcctttgcgaatacgcccacgcgatgggtaacagtcttggcggtttcgctaaatactggcaggcgtttcgtcagtatccccgtttacagggcggcttcgtctgggactgggtggatcagtcgctgattaaatatgatgaaaacggcaacccgtggtcggcttacggcggtgattttggcgatacgccgaacgatcgccagttctgtatgaacggtctggtctttgccgaccgcacgccgcatccagcgctgacggaagcaaaacaccagcagcagtttttccagttccgtttatccgggcaaaccatcgaagtgaccagcgaatacctgttccgtcatagcgataacgagctcctgcactggatggtggcgctggatggtaagccgctggcaagcggtgaagtgcctctggatgtcgctccacaaggtaaacagttgattgaactgcctgaactaccgcagccggagagcgccgggcaactctggctcacagtacgcgtagtgcaaccgaacgcgaccgcatggtcagaagccgggcacatcagcgcctggcagcagtggcgtctggcggaaaacctcagtgtgacgctccccgccgcgtcccacgccatcccgcatctgaccaccagcgaaatggatttttgcatcgagctgggtaataagcgttggcaatttaaccgccagtcaggctttctttcacagatgtggattggcgataaaaaacaactgctgacgccgctgcgcgatcagttcacccgtgcaccgctggataacgacattggcgtaagtgaagcgacccgcattgaccctaacgcctgggtcgaacgctggaaggcggcgggccattaccaggccgaagcagcgttgttgcagtgcacggcagatacacttgctgatgcggtgctgattacgaccgctcacgcgtggcagcatcaggggaaaaccttatttatcagccggaaaacctaccggattgatggtagtggtcaaatggcgattaccgttgatgttgaagtggcgagcgatacaccgcatccggcgcggattggcctgaactgccagctggcgcaggtagcagagcgggtaaactggctcggattagggccgcaagaaaactatcccgaccgccttactgccgcctgttttgaccgctgggatctgccattgtcagacatgtataccccgtacgtcttcccgagcgaaaacggtctgcgctgcgggacgcgcgaattgaattatggcccacaccagtggcgcggcgacttccagttcaacatcagccgctacagtcaacagcaactgatggaaaccagccatcgccatctgctgcacgcggaagaaggcacatggctgaatatcgacggtttccatatggggattggtggcgacgactcctggagcccgtcagtatcggcggaattccagctgagcgccggtcgctaccattaccagttggtctggtgtcaaaaataataataaccgggcaggggggatccaattctgtgagcgtatggcaaacgaaggaaaaatagttatagtagccgcactcgatgggacatttcaacgtaaaccgtttaataatattttgaatcttattccattatctgaaatggtggtaaaactaactgctgtgtgtatgaaatgctttaaggaggcttccttttctaaacgattgggtgaggaaaccgagatagaaataataggaggtaatgatatgtatcaatcggtgtgtagaaagtgttacatcgactcataatattatattttttatctaaaaaactaaaaataaacattgattaaattttaatataatacttaaaaatggatgttgtgtcgttagataaaccgtttatgtattttgaggaaattgataatgagttagattacgaaccagaaagtgcaaatgaggtcgcaaaaaaactgccgtatcaaggacagttaaaactattactaggagaattattttttcttagtaagttacagcgacacggtatattagatggtgccaccgtagtgtatataggatctgctcccggtacacatatacgttatttgagagatcatttctataatttaggagtgatcatcaaatggatgctaattgacggccgccatcatgatcctattttaaatggattgcgtgatgtgactctagtgactcggttcgttgatgaggaatatctacgatccatcaaaaaacaactgcatccttctaagattattttaatttctgatgtgagatccaaacgaggaggaaatgaacctagtacggcggatttactaagtaattacgctctacaaaatgtcatgattagtattttaaaccccgtggcgtctagtcttaaatggagatgcccgtttccagatcaatggatcaaggacttttatatcccacacggtaataaaatgttacaaccttttgctccttcatattcagctgaaatgagattattaagtatttataccggtgagaacatgagactgactcgagttaccaaattagacgctgtaaattatgaaaaaaagatgtactaccttaataagatcgtccgtaacaaagtagttgttaactttgattatcctaatcaggaatatgactattttcacatgtactttatgctgaggaccgtgtactgcaataaaacatttcctactactaaagcaaaggtactatttctacaacaatctatatttcgtttcttaaatattccaacaacatcaactgaaaaagttagtcatgaaccaatacaacgtaaaatatctagcaaaaattctatgtctaaaaacagaaatagcaagagatccgtacgcggtaataaatagaaacgtactactgagatatactaccgatatagagtataatgatttagttactttaataaccgttagacataaaattgattctatgaaaactgtgtttcaggtatttaacgaatcatccataaattatactccggttgatgatgattatggagaaccaatcattataacatcgtatcttcaaaaaggtcataacaagtttcctgtaaattttctatacatagatgtggtaatatctgacttatttcctagctttgttagactagatactacagaaactaatatagttaatagtgtactacaaacaggcgatggtaaaaagactcttcgtcttcccaaaatgttagagacggaaatagttgtcaagattctctatcgccctaatataccattaaaaattgttagatttttccgcaataacatggtaactggagtagagatagccgatagatctgttatttcagtcgctgattaatcaattagtagagatgagataagaacattataataatcaataatatatcttatatcttatatcttatatcttatatcttgtttagaaaaatgctaatattaaaatagctaacgctagtaatccaatcggaagccatttgatatctataatagggtatctaatttcctgatttaaatagcggacagctatattctcggtagctactcgtttggaatcacaaacattatttacatctaatttactatctgtaatggaaacgtttcccaatgaaatggtacaatccgatacattgcattttgttatatttttttttaaagaggctggtaacaacgcatcgcttcgtttacatggctcgtaccaacaataatagggtaatcttgtatctattcctatccgtactatgcttttatcaggataaatacatttacatcgtatatcgtctttgttagcatcacagaatgcataaatttgttcgtccgtcatgataaaaatttaaagtgtaaatataactattatttttatagttgtaataaaaagggaaatttgattgtatactttcggttctttaaaagaaactgacttgataaaaatggctgtaatctctaaggttacgtatagtctatatgatcaaaaagagattaatgctacagatattatcattagtcatgttaaaaatgacgacgatatcggtaccgttaaagatggtagactaggtgctatggatggggcattatgtaagacttgtgggaaaacggaattggaatgtttcggtcactggggtaaagtaagtatttataaaactcatatagttaagcctgaatttatttcagaaattattcgtttactgaatcatatatgtattcactgcggattattgcgttcacgagaaccgtattccgacgatattaacctaaaagagttatcgggacacgctcttaggagattaaaggataaaatattatccaagaaaaagtcatgttggaacagtgaatgtatgcaaccgtatcaaaaaattactttttcaaagaaaaaggtttgtttcgtcaacaagttggatgatattaacgttcctaattctctcatctatcaaaagttaatttctattcatgaaaagttttggccattattagaaattcatcaatatccagctaacttattttatacagactactttcccatccctccgttgattattagaccggctattagtttttggatagatagtatacccaaagagaccaatgaattaacttacttattaggtatgatcgttaagaattgtaacttgaatgctgatgaacaggttatccagaaggcggtaatagaatacgatgatattaaaattatttctaataacactaccagtatcaatttatcatatattacatccggcaaaaataatatgattagaagttatatcgtcgcccgacgaaaagatcagaccgctagatctgtaattggtcccagtacatctatcaccgttaatgaggtaggaatgcccgcatatattagaaatacacttacagaaaagatatttgttaatgcctttacagtggataaagttaaacaactattagcgtcaaaccaagttaaattttactttaataaacgattaaaccaattaacaagaatacgccaaggaaagtttattaaaaataaaatacatttattgcctggtgattgggtagaagtagctgttcaagaatatacaagtattatttttggaagacagccgtctctacatagatacaacgtcatcgcttcatctatcagagctaccgaaggagatactatcaaaatatctcccggaattgccaactctcaaaatgctgatttcgacggggatgaggaatggatgatattagaacaaaatcctaaagctgtaattgaacaaagtattcttatgtatccgacgacgttactcaaacacgatattcatggagcccccgtttatggatctattcaagatgaaatcgtagcagcgtattcattgtttaggatacaagatctttgtttagatgaagtattgaacatcttggggaaatatggaagagagttcgatcctaaaggtaaatgtaaattcagcggtaaagatatctatacttacttgataggtgaaaagattaattatccgggtctcttaaaggatggtgaaattattgcaaacgacgtagatagtaattttgttgtggctatgaggcatctgtcattggctggactcttatccgatcataagtcgaacgtggaaggtatcaactttattatcaagtcatcttatgtttttaagagatatctatctatttacggttttggggtgacattcaaagatctgagaccaaattcgacgttcactaataaattggaggccatcaacgtagaaaaaatagaacttatcaaagaagcatacgccaaatatctcaacgatgtaagagacgggaaaatagttccattatctaaagctttagaggcggactatgtggaatccatgttatccaacttgacaaatcttaatatccgagagatagaagaacatatgagacaaacgctgatagatgatccagataataacctcctgaaaatggccaaagcgggttataaagtaaatcccacagaactaatgtatattctaggtacgtatggacaacaaaggattgatggtgaaccagcagagactcgagtattgggtagagttttaccttactatcttccagactctaaggatccagaaggaagaggttacattcttaattctttaacaaaaggattaacgggttctcaatattacttttcgatgctggttgccagatctcaatctactgatatcgtctgtgaaacatcacgtaccggaacactggctagaaaaatcattaaaaagatggaggatatggtggtcgacggatacggacaagtagttataggtaatacgctcatcaagtacgccgccaattataccaaaattctaggctcagtatgtaaacctgtagatcttatctatccagatgagtccatgacttggtatttggaaattagtgctctgtggaataaaataaaacagggattcgtttactctcagaaacagaaacttgcaaagaagacattggcgccgtttaatttcctagtattcgtcaaacccaccactgaggataatgctattaaggttaaggatctgtacgatatgattcataacgtcattgatgatgtgagagagaaatacttctttacggtatctaatatagattttatggagtatatattcttgacgcatcttaatccttctagaattagaattacaaaagaaacggctatcactatctttgaaaagttctatgaaaaactcaattatactctaggtggtggaactcctattggaattatttctgcacaggtattgtctgagaagtttacacaacaagccctgtccagttttcacactactgaaaaaagtggtgccgtcaaacaaaaacttggtttcaacgagtttaataacttgactaatttgagtaagaataagaccgaaattatcactctggtatccgatgatatctctaaacttcaatctgttaagattaatttcgaatttgtatgtttgggagaattaaatccaaacatcactcttcgaaaagaaacagataaatatgtagtagatataatagtcaatagattatacatcaagagagcagaaataaccgaattagtcgtcgaatatatgattgaacgatttatctcctttagcgtcattgtaaaggaatggggtatggagacattcattgaggacgaggataatattagatttactgtctacctaaatttcgttgaaccggaagaattgaatcttagtaagtttatgatggttcttccgggggcagccaacaagggaaagattagtaaattcaagattcctatctctgattatacgggatatgacgacttcaatcaaacaaaaaagctcaataagatgactgtagaactcatgaatctaaaagaattgggttctttcgatttggaaaacgtcaacgtgtatcctggagtatggaatacatacgatatcttcggtatcgaggccgctcgtgaatacttgtgcgaagccatgttaaacacctatggagaagggttcgattatctgtatcagccttgtgatcttctcgctagtttactatgtgctagttacgaaccagaatcagtgaataaattcaagttcggcgcagctagtactcttaagagagctacgttcggagacaataaagcattgttaaacgcggctcttcataaaaagtcagaacctattaacgataatagtagctgccacttttttagcaaggtccctaatataggaactggatattacaaatactttatcgacttgggtcttctcatgagaatggaaaggaaactatctgataagatatcttctcaaaagatcaaggaaatggaagaaacagaagacttttaattcttatcaataacatatttttctatgatctgtcttttaaacgatggattttccacaaatgcgcctctcaagtccctcatagaatgatacacgtataaaaaatatagcataggcaatgactccttatttttagacattagatatgccaaaatcatagccccgcttctatttactcccgcagcacaatgaaccaacacgggctcgtttcgttgatcacatttagataaaaaggcggttacgtcgtcaaaatatttactaatatcggtagttgtatcatctaccaacggtatatgaataatattaatattagagttaggtaatgtatatttatccatcgtcaaatttaaaacatatttgaacttaacttcagatgatggtgcatccatagcatttttataatttcccaaatacacattattggttacccttgtcattatagtgggagatttggctttgtgcatatctccagttgaacgtagtagtaagtatttatacaaacttttcttatccatttataacgtacaaatggataaaactactttatcggtaaacgcgtgtaatttagaatacgttagagaaaaggctatagtaggcgtacaagcagccaaaacatcaacacttatattctttgttattatattggcaattagtgcgctattactctggtttcagacgtctgataatccagtctttaatgaattaacgagatatatgcgaattaaaaatacggttaacgattggaaatcattaacggatagcaaaacaaaattagaaagtgatagaggtagacttctagccgctggtaaggatgatatatttgaattcaaatgtgtggatttcggcgcctattttatagctatgcgattggataagaaaacatatctgccgcaagctattaggcgaggtactggagacgcgtggatggttaaaaaggcggcaaaggtcgatccatctgctcaacaattttgtcagtatttgataaaacacaagtctaataatgttattacttgtggtaatgagatgttaaatgaattaggttatagcggttattttatgtcaccgcattggtgttccgattttagtaatatggaatagtgttagataaatgcggtaacgaatgttcctgtaaggaaccataacagcttagatttaacgttaaagatgagcataaacataataaacaaaattacaatcaaacttataacattaatatcaaacaatccaaaaaatgaaatcagtggagtagtaaacgcgtacataactcctggataacgtttagcagctgccgttcctattctagaccaaaaattcggtttcatgttttcgaaacggtattctgcaacaagtcgaggatcgtgttctacatatttggcggcattatccagtatctgcctattgatcttcatttcgttttcgattctggctatttcaaaataaaatcccgatgatagacctccagactttataatttcatctacgatgttcagcgccgtagtaactctaataatataggctgataagctaacatcataccctcctgtatatgtgaatatggcatgatttttgtccattacaagctcggttttaactttattgcctgtaataatttctctcatctgtaggatatctatttttttgtcatgcattgccttcaagacgggacgaagaaacgtaatatcctcaataacgttatcgttttctacaataactacatattctacctttttattttctaactcggtaaaaaaattagaatcccatagggctaaatgtctagcgatatttcttttcgtttcctctgtacacatagtgttacaaaaccctgaaaagaagtgagtatacttgtcatcatttctaatgtttcctccagtccactgtataaacgcataatccttgtaatgatctggatcatccttgactaccacaacatttcttttttctggcataacttcgttgtcctttacatcatcgaacttctgatcattaatatgctcatgaacattaggaaatgtttctgatggaggtctatcaataactggcacaacaataacaggagttttcaccgccgccatttagttattgaaattaatcatatacaactctttaatacgagttatattttcgtctatccattgtttcacattgacatatttcgacaaaaagatataaaatgcgtattccaatgcttctctgtttaatgaattactaaaatatacaaacacgtcactgtctggcaataaatgatatcttagaatattgtaacaatttattttgtattgcacatgttcgtgatctatgagttcttcttcgaatggcataggatctccgaatctgaaaacgtataaataggagttagaataataatatttgagagtattggtaatatataaactctttagcggtataattagtttttttctctcaatttctatttttagatgtgatggaaaaatgactaattttgtagcattagtatcatgaactctaatcaaaatcttaatatcttcgtcacacgttagctctttgaagtttttaagagatgcatcagttggttctacagatggagtaggtgcaacaattttttgttctacacatgtatgtactggagccattgttttaactataatggtgcttgtatcgaaaaactttaatgcagatagcggaagctcttcgccgcgactttctacgtcgtaattgggttctaacgccgatctctgaatggatactagttttctaagttctaatgtgattctctgaaaatgtaaatccaattcctccggcattatagatgtgtatacatcggtaaataaaactatagtatccaacgatcccttctcgcaaattctagtcttaaccaaaaaatcgtatataaccacggagatggcgtatttaagagtggattcttctaccgttttgttcttggatgtcatataggaaactataaagtccgcactactgttaagaatgattactaacgcaactatatagtttaaattaagcattttggaaacataaaataactctgtagacgatacttgactttcgaataagtttgcagacaaacgaagaaagaacagacctctcttaatttcagaagaaaactttttttcgtattcctgacgtctagagtttatatcaataagaaagttaagaattagtcggttaatgttgtatttcattacccaagtttgagatttcataatattatcaaaagacatgataatattaaagataaagcgctgactatgaacgaaatagctatatggttcgctcaagaatatagtcttgttaaacgtggaaacgataactgtatttttaatcacgtcagcggcatctaaattaaatataggtatatttattccacacactctacaatatgccacaccatcttcataataaataaattcgttagcaaaattattaattttagtgaaatagttagcgtcaactttcatagcttccttcaatctaatttgatgctcacacggtgcgaattccactctaacatcccttttccatgcctcaggttcatcgatctctataatatctagttttttgcgtttcacaaacacaggctcgtctctcgcgatgagatctgtatagtaactatgtaaatgataactagatagaaagatgtagctatatagatgacgatcctttaagagaggtataataactttaccccaatcagatagactgttgttatggtcttcggaaaaagaatttttataaatttttccagtattttccaaatatacgtacttaacatctaaaaaatccttaatgataataggaatggataatccgtctattttataaagaaatacatatcgcacattatacttttttttggaaatgggaataccgatgtgtctacataaatatgcaaagtctaaatattttttagagaatcttagttggtccaaattcttttccaagtacggtaatagatttttcatattgaacggtatcttcttaatctctggttctagttccgcattaaatgatgaaactaagtcactatttttataactaacgattacatcacctctaacatcatcatttaccagaatactgatcttcttttgtcgtaaatacatgtctaatgtgttaaaaaaaagatcatacaagttatacgtcatttcatctgtggtattcttgtcattgaaggataaactcgtactaatctcttctttaacagcctgttcaaatttatatcctatatacgaaaaaatagcaaccagtgtttgatcatccgcgtcaatattctgttctatcgtagtgtataacaatcgtatatcttcttctgtgatagtcgatacgttataaaggttgataacgaaaatatttttatttcgtgaaataaagtcatcgtaggattttggacttatattcgcgtctagtagatatgcttttatttttggaatgatctcaattagaatagtctctttagagtccatttaaagttacaaacaactaggaaattggtttatgatgtataatttttttagtttttatagattctttattctatacttaaaaaatgaaaataaatacaaaggttcttgagggttgtgttaaattgaaagcgagaaataatcataaattatttcattatcgcgatatccgttaagtttgtatcgtaatggcgtggtcaattacgaataaagcggatactagtagcttcacaaagatggctgaaatcagagctcatctaaaaaatagcgctgaaaataaagataaaaacgaggatattttcccggaagatgtaataattccatctactaagcccaaaaccaaacgagccactactcctcgtaaaccagcggctactaaaagatcaaccaaaaaggaggaagtggaagaagaagtagttatagaggaatatcatcaaacaactgaaaaaaattctccatctcctggagtcagcgacattgtagaaagcgtggccgctgtagagctcgatgatagcgacggggatgatgaacctatggtacaagttgaagctggtaaagtaaatcatagtgctagaagcgatctctctgacctaaaggtggctaccgacaatatcgttaaagatcttaagaaaattattactagaatctctgcagtatcgacggttctagaggatgttcaagcagctggtatctctagacaatttacttctatgactaaagctattacaacactatctgatctagtcaccgagggaaaatctaaagttgttcgtaaaaaagttaaaacttgtaagaagtaaatgcgtgcacttttttataaagatggtaaactctttaccgataataattttttaaatcctgtatcagacgataatccagcgtatgaggttttgcaacatgttaaaattcctactcatttaacagatgtagtagtatatgaacaaacgtgggaggaggcgttaactagattaatttttgtgggaagtgattcaaaaggacgtagacaatacttttacggaaaaatgcatgtacagaatcgcaacgctaaaagagatcgtatttttgttagagtatataacgttatgaaacgaattaattgttttataaacaaaaatataaagaaatcgtccacagattccaattatcagttggcggtttttatgttaatggaaactatgttttttattagatttggtaaaatgaaatatcttaaggagaatgaaacagtagggttattaacactaaaaaataaacacatagaaataagtcccgatgaaatagttatcaagtttgtaggaaaggacaaagtttcacatgaatttgttgttcataagtctaatagactatataaaccgctattgaaactgacggatgattctagtcccgaagaatttctgttcaacaaactaagtgaacgaaaggtatacgaatgtatcaaacagtttggtattagaatcaaggatctccgaacgtatggagtcaattatacgtttttatataatttttggacaaatgtaaagtccatatctcctcttccgtcaccaaaaaagttaatagcattaactatcaaacaaactgctgaagtggtaggtcatactccatcaatttcaaaaagagcttatatggcaacgactattttagaaatggtaaaggataaaaattttttagatgtagtatctaaaactacgttcgatgaattcctatctatagtcgtagatcacgttaaatcatctacggatggatgatatagatctttacacaaataattacaagaccgataaatggaaatggataagcgtatgaaatctctcgcaatgacagctttcttcggagagctaagcacattagatattatggcattgataatgtctatatttaaacgccatccaaacaataccattttttcagtggataaggatggtcagtttatgattgatttcgaatacgataattataaggcttctcaatatttggatctgaccctcactccgatatctggagatgaatgcaagactcacgcatcgagtatagccgaacaattggcgtgtgcggatattattaaagaggatattagcgaatatatcaaaactactccccgtcttaaacgatttataaaaaaataccgcaatagatcagatactcgtatcagtcgagatacagaaaagcttaaaatagctctagctaaaggcatagattacgaatatataaaagacgcttgttaataagtaaatgaaaaaaaactagtcgtttataataaaacacgatatggatgccaacgtagtatcattttctactattgcgacgtatatagacgctttagcgaagaatgcttcggaattagaacagaggtctaccgcatacgaaataaataatgaattggaactagtatttattaagccgccattgattactttgacaaatgtagtgaatatctctacgattcaggaatcgtttattcgatttaccgttactaataaggaaggtgttaaaattagaactaagattccattatctaaggtacatggtctagatgtaaaaaatgtacagttagtagatgctatagataacatagtttgggaaaagaaatcattagtgacggaaaatcgtcttcacaaagaatgcttgttgagactatcgacagaggaacgtcatatatttttggattacaagaaatatggatcctctatccgactagaattagtcaatcttattcaagcaaaaacaaaaaactttacgatagactttaagctaaaatattttctaggatccggtgcccagtctaaaagttctttgttgcacgctattaatcatccaaagtcaaggcctaatacatctctggaaatagaattcacacctagagacaatgaaacagttccatatgatgaactaataaaggaattgacgactctctcgcgtcatatatttatggcttctccagagaatgtaattctttctccgcctattaacgcgcctataaaaacctttatgttgcctaaacaagatatagtaggtttggatctggaaaatctatatgccgtaactaagactgacggcattcctataactatcagagttacatcaaacgggttgtattgttattttacacatcttggttatattattagatatcctgttaagagaataatagattccgaagtagtagtctttggtgaggcagttaaggataagaactggaccgtatatctcattaagctaatagagcctgtgaatgcaatcaatgatagactagaagaaagtaagtatgttgaatctaaactagtggatatttgtgatcggatagtattcaagtcaaagaaatacgaaggtccgtttactacaactagtgaagtcgtcgatatgttatctacatatttaccaaagcaaccagaaggtgttattctgttctattcaaagggacctaaatctaacattgattttaaaattaaaaaggaaaatactatagaccaaactgcaaatgtagtatttaggtacatgtccagtgaaccaattatctttggagaatcgtctatctttgtagagtataagaaatttagcaacgataaaggctttcctaaagaatatggttctggtaagattgtgttatataacggcgttaattatctaaataatatctattgtttggaatatattaatacacataatgaagtgggtattaagtccgtggttgtacctattaagtttatagcagaattcttagttaatggagaaatacttaaacctagaattgataaaaccatgaaatatattaactcagaagattattatggaaatcaacataatatcatagtcgaacatttaagagatcaaagcatcaaaataggagatatctttaacgaggataaactatcggatgtgggacatcaatacgccaataatgataaatttagattaaatccagaagttagttattttacgaataaacgaactagaggaccgttgggaattttatcaaactacgtcaagactcttcttatttctatgtattgttccaaaacatttttagacgattccaacaaacgaaaggtattggcgattgattttggaaacggtgctgacctggaaaaatacttttatggagagattgcgttattggtagcgacggatccggatgctgatgctatagctagaggaaatgaaagatacaacaaattaaactctggaattaaaaccaagtactacaaatttgactacattcaggaaactattcgatccgatacatttgtctctagtgtcagagaagtattctattttggaaagtttaatatcatcgactggcagtttgctatccattattcttttcatccgagacattatgctaccgtcatgaataacttatccgaactaactgcttctggaggcaaggtattaatcactaccatggacggagacaaattatcaaaattaacagataaaaagacttttataattcataagaatttacctagtagcgaaaactatatgtctgtagaaaaaatagctgatgatagaatagtggtatataatccatcaacaatgtctactccaatgactgaatacattatcaaaaagaacgatatagtcagagtgtttaacgaatacggatttgttcttgtagataacgttgatttcgctacaattatagaacgaagtaaaaagtttattaatggcgcatctacaatggaagatagaccgtctacaaaaaactttttcgaactaaatagaggagccattaaatgtgaaggtttagatgtcgaagacttacttagttactatgttgtttatgtcttttctaagcggtaaataataatatggtatgggttctgatctcccagttctaaatgcattaaataattccaatagagcgatttttgttcctataggaccttccaactgtggatactctgtattgttaatagatatattaatacttttgtcgggtaacagaggttctacgtcttctaaaaataaaagttttataacatctggcctgttcataaataaaaacttggcgattctatatatactcttattatcaaatctagccattgtcttatagatgtgagctactgtaggtgtaccatttgattttctttctaatactatatatttctctcgaagaagttcttgcacatcatctgggaataaaatactactgttgagtaaatcagttattttttttatatcgatattgatggacatttttatagttaaggataataagtatcccaaagtcgataacgacgataacgaagtatttatacttttaggaaatcacaatgactttatcagattaaaattaacaaaattaaaggagcatgtatttttttctgaatatattgtgactccagatacatatggatctttatgcgtcgaattaaatgggtctagttttcagcacggcggtagatatatagaggtggaggaatttatagatgctggaagacaagttagatggtgttctacatccaatcatatatctaaagatatacccgaagatatgcacactgataaatttgtcatttatgatatttatacgtttgattcgttcaagaataaacgattggtattcgtacaggtacctccgtcgttaggagatgatagtcatttgactaatccgttattgtcaccgtattatcgtaattcagtagccagacaaatggtcaatgatatgatttttaatcaagattcatttttaaaatatttattagaacatctgattagaagccactatagagtttctaaacatataacaatagttagatacaaggataccgaagaattaaatctaacgagaatatgttataatagagataagtttaaggcgtttgtattcgcttggtttaacggcgtttcggaaaatgaaaaggtactagatacgtataaaaaggtatctaatttgatataatgaattcagtgactgtatcacacgcgccatatactattacttatcacgatgattgggaaccagtaatgagtcaattggtagagttttataacgaagtagccagttggctgctacgagacgagacgtcgcctattcctgataagttctttatacagttgaaacaaccgcttagaaataaacgagtatgtgtgtgtggtatagatccgtatccgaaagatggaactggtgtaccgttcgaatcaccaaattttacaaaaaaatcaattaaggagatagcttcatctatatctagattaaccggagtaattgattataaaggttataaccttaatataatagacggggttataccctggaattattacttaagttgtaaattaggagaaacaaaaagtcacgcgatttactgggataagatttccaagttactgctgcagcatataactaaacacgttagtgttctttattgtttgggtaaaacagatttctcgaatatacgggccaagttagaatccccggtaactaccatagtcggatatcatccagcggctagagaccgccaattcgagaaagatagatcatttgaaattatcaacgttttactggaattagacaacaaggcacctataaattgggctcaagggtttatttattaatgctttagtgaaattttaacttgtgttctaaatggatgcggctattagaggtaatgatgttatctttgttcttaagactataggtgtcccgtcagcgtgcagacaaaatgaagatccaagatttgtagaagcatttaaatgcgacgagttagaaagatatattgagaataatccagaatgtacactattcgaaagtcttagggatgaggaagcatactctatagtcagaattttcatggatgtagatttagacgcgtgtctagacgaaatagattatttaacggccattcaagattttattatcgaggtgtcaaactgtgtagctagattcgcgtttacagaatgcggcgccattcatgaaaatgtaataaaatccatgagatctaatttttcattgactaagtctacaaatagagataaaacaagttttcatattatctttttagatacgtataccactatggatacattgatagctatgaaacgaacactattagaattaagtagatcatctgaaaatccactaaccagatcgatagacactgccgtatataggagaaaaacaactcttcgggttgtaggtactaggaaaaatccaaattgcgacactattcatgtaatgcaaccaccgcatgataatatagaagattacctattcacttacgtggatatgaacaacaatagttattacttttctctacaacaacgattggaggatttagttcctgataagttatgggaaccagggtttatttcattcgaagacgctataaaaagagtttcaaaaatattcattaattctataataaactttaatgatctcgatgaaaataattttacaacggtaccactggtcatagattacgtaacaccttgtgcattatgtaaaaaacgatcgcataaacatccgcatcaactatcgttggaaaatggtgctattagaatttacaaaactggtaatccacatagttgtaaagttaaaattgttccgttggatggtaataaactgtttaatattgcacaaagaattttagacactaactctgttttattaaccgaacgaggagaccatatagtttggattaataattcatggaaatttaacagcgaagaacccttgataacaaaactaattttgtcaataagacatcaactacctaaggaatattcaagcgaattactctgtccaagaaaacgaaagactgtagaagctaacatacgagacatgttagtagattcagtggagaccgatacctatccggataaacttccgtttaaaaatggtgtattggacctggtagacggaatgttttactctggagatgatgctaaaaaatatacgtgtactgtatcaaccggatttaaatttgacgatacaaagttcgtcgaagacagtccagaaatggaagagttaatgaatatcattaacgatatccaaccattaacggatgaaaataagaaaaatagagagctatatgaaaaaacattatctagttgtttatgcggtgctaccaaaggatgtttaacattcttttttggagaaactgcaactggaaagtcgacaaccaaacgtttgttaaagtctgctatcggtgacctgtttgttgagacgggtcaaacaattttaacagatgtattggataaaggacctaatccatttatcgctaacatgcatttgaaaagatctgtattctgtagcgaactacctgattttgcctgtagtggatcaaagaaaattagatctgacaatattaaaaagttgacagaaccttgtgtcattggaagaccgtgtttctccaataaaattaataatagaaaccatgcgacaatcattatcgatactaattacaaacctgtttttgataggatagataacgcattaatgagaagaattgccgtcgtgcgattcagaacacacttttctcaaccttctggtagagaggctgctgaaaataatgacgcgtacgataaagtcaaactattagacgaggggttagatggtaaaatacaaaataatatatatagatttgcatttctatacttgttggtgaaatggtacaaaaaatatcatgttcctattatgaaactatatcctacacccgaagagattcctgactttgcattctatctcaaaataggtactctgttggtatctagctctgtaaagcatattccattaatgacggacctctccaaaaagggatatatattgtacgataatgtggtcactcttccgttgactactttccaacagaaaatatccaagtattttaattctagactatttggacacgatatagagagcttcatcaatagacataagaaatttgccaatgttagtgatgaatatctgcaatatatattcatagaggatatttcatctccgtaaatatatgctcatatatttatagaagatatcacatatctaaatgaataccggaatcatagatttatttgataatcatgttgatagtataccaactatattacctcatcagttagctactctagattatctagttagaactatcatagatgagaacagaagcgtgttattgttccatattatgggatcaggtaaaacaataatcgctttgttgttcgccttggtagcttccagatttaaaaaggtttacattctagtgccgaacatcaacatcttaaaaattttcaattataatatgggtgtagctatgaacttgtttaatgacgaattcatagctgagaatatctttattcattccacaacaagtttttattctcttaattataacgataacgtcattaattataacggattatctcgctacaataactctatttttatcgttgatgaggcacataatatctttgggaataatactggagaacttatgaccgtgataaaaaataaaaacaagattccttttttactattgtctggatctcccattactaacacacctaatactctgggtcatattatagatttaatgtccgaagagacgatagattttggtgaaattattagtcgtggtaagaaagtaattcagacacttcttaacgaacgcggtgtgaatgtacttaaggatttgcttaaaggaagaatatcatattacgaaatgcctgataaagatctaccaacgataagatatcacggacgtaagtttctagatactagagtagtatattgtcacatgtctaaacttcaagagagagattatatgattactagacgacagctatgttatcatgaaatgtttgataaaaatatgtataacgtgtcaatggcagtattgggacaacttaatctgatgaataatttagatactttatttcaggaacaggataaggaattgtacccaaatctgaaaataaataatggcgtgttatacggagaagaattggtaacgttaaacattagttccaaatttaaatactttattaatcggatacagacactcaacggaaaacattttatatacttttctaattctacatatggcggattggtaattaaatatatcatgctcagtaatggatattctgaatataatggttctcagggaactaatccacatatgataaacggcaaaccaaaaacatttgctatcgttactagtaaaatgaaatcgtctttagaggatctattagatgtgtataattctcctgaaaacgatgatggtagtcaattgatgtttttgttttcatcaaacattatgtccgaatcctatactctaaaagaggtaaggcatatttggtttatgactatcccagatactttttctcaatacaaccaaattcttggacgatctattagaaaattctcttacgccgatatttctgaaccagttaatgtatatcttttagccgccgtatattccgatttcaatgacgaagtgacgtcattaaacgattacacacaggatgaattaattaatgttttaccatttgacatcaaaaagctgttgtatctaaaatttaagacgaaagaaacgaatagaatatactctattcttcaagagatgtctgaaacgtattctcttccaccacatccatcaattgtaaaagttttattgggagaattggtcagacaatttttttataataattctcgtattaagtataacgataccaagttacttaaaatggttacatcagttataaaaaataaagaagacgctaggaattacatagatgatattgtaaacggtcacttctttgtatcgaataaagtatttgataaatctcttttatacaaatacgaaaacgatattattacagtaccgtttagactttcctacgaaccatttgtttggggagttaactttcgtaaagaatataacgtggtatcttctccataaaactgatgagatatataaagaaataaatgtcgagctttgttaccaatggatacctttccgttacattggaaccacacgagctgacgttagacataaaaactaatattaggaatgccgtatataagacgtatctccatagagaaattagtggtaaaatggccaagaaaatagaaattcgtgaagacgtggaattacctctcggcgaaatagttaataattctgtagttataaacgttccgtgtgtaataacctacgcgtattatcacgttggggatatagtcagaggaacattaaacatcgaagatgaatcaaatgtaactattcaatgtggagatttaatctgtaaactaagtagagattcgggtactgtatcatttagcgattcaaagtactgcttttttcgaaatggtaatgcgtatgacaatggcagcgaagtcactgccgttctaatggaggctcaacaaggtatcgaatctagttttgtttttctcgcgaatatcgtcgactcataaaaaagagaatagcggtaagtataaacacgaatactatggcaataattgcgaatgttttattctcttcgatatatttttgataatatgaaaaacatgtctctctcaaatcggacaaccatctcataaaatagttctcgcgcgctggagaggtagttgccgctcgtataatctctccagaataatatacttgcgtgtcgtcgttcaatttatacggatttctatagttctctgttatataatgcggtttgccctcatgattagacgacgacaatagtgttctaaatttagatagttgatcagaatgaatgtttattggcgttggaaaaattatccatacagcgtctgcagagtggttgatagttgttcctagatatgtaaaataatccaacttactaggcagcaaattgtctagataaaatactgaatcaaacggtgcagacgtattggcggatctaatggaatccaattgattaactatcttttgaaaatatacatttttatgatccaatacttgtaagaatatagaaataatgataagtccatcatcgtgtttttttgcctcttcataagaactatattttttcttattccaatgaacaagattaatctctccagagtatttgtacacatctatcaagtgattggatccataatcgtcttcctttccccaatatatatgtagtgatgataacacatattcattggggagaaaccctccacttatatatcctcctttaaaattaatccttactagttttccagtgttctggatagtggttggtttcgactcattataatgtatgtctaacggcttcaatcgcgcgttagaaattgcttttttagtttctatattaataggagatagttgttgcggcatagtaaaaatgaaatgataactgtttaaaaatagctcttagtatgggaattacaatggatgaggaagtgatatttgaaactcctagagaattaatatctattaaacgaataaaagatattccaagatcaaaagacacgcatgtgtttgctgcgtgtataacaagtgacggatatccgttaataggagctagaagaacttcattcgcgttccaggcgatattatctcaacaaaattcagattctatctttagagtatccactaaactattacggtttatgtactacaatgaactaagagaaatctttagacggttgagaaaaggttctatcaacaatatcgatcctcactttgaagagttaatattattgggtggtaaactagataaaaaggaatctattaaagattgtttaagaagagaattaaaagaggaaagtgatgaacgtataacagtaaaagaatttggaaatgtaattctaaaacttacaacacgggataaattatttaataaagtatatataagttattgcatggcgtgttttattaatcaatcgttggaggatttatcgcatactagtatttacaatgtagaaattagaaagattaaatcattaaatgattgtattaacgacgataaatacgaatatctgtcttatatttataatatgctagttaatagtaaatgaacttttacagatctagtataattagtcagattattaagtataatagacgactagctaagtctattatttgcgaggatgactctcaaattattacactcacggcattcgttaaccaatgcctatggtgtcataaacgagtatccgtgtccgctattttattaactactgataacaaaatattagtatgtaacagacgagatagttttctctattctgaaataattagaactagaaacatgtttagaaagaaacgattatttctgaattattccaattatttgaacaaacaggaaagaagtatactatcgtcatttttttctctagatccagctactactgataatgatagaatagacgctatttatccgggtggcatacccaaaaggggtgagaatgttccagagtgtttatccagggaaattaaagaagaagttaatatagacaattcttttgtattcatagacactcggttttttattcatggcatcatagaagataccattattaataaattttttgaggtaatcttctttgtcggaagaatatctctaacgagtgatcaaatcattgatacatttaaaagtaatcatgaaatcaaggatctaatatttttagatccgaattcaggtaatggactccaatacgaaattgcaaaatatgctctagatactgcaaaacttaaatgttacggccatagaggatgttattatgaatcattaaaaaaattaactgaggatgattgattaaaaaatataaattaatttaccatcgtgtatttttataacgggattgtccggcatatcatgtagatagttaccgtctacatcgtatactcgaccatctacgcctttaaatcctctatttattgacattaatctattagaattggaataccaaatattagtaccctcaattagtttattggtaatattttttttagacgatagatcgatggctcttgaaaccaaggttttccaaccggactcattgtcgatcggtgagaagtctttttcattagcatgaatccattctaatgatgtatgtttaaacactctaaacaattggacaaattcttttgatttgctttgaatgatttcaaataggtcttcgtctacagtaggcataccattagataatctagccattataaagtgcacgtttacatatctacgttctggaggagtaagaacgtgactattgagacgaatggctcttcctactatctgacgaagagacgcctcgttccatgtcatatctaaaatgaagatatcattaattgagaaaaaactaataccctcgcctccactagaagagaatacgcatgttttaatgcattctccgttagtgtttgattcttggttaaactcagccaccgccttgattctagtatcttttgttctagatgagaactctatattagagataccaaagactttgaaatatagtaataagatttctattcctgactgattaacaaatggttcaaagactagacatttaccatgggatgctaatattcccaaacatacatctataaatttgacgcttttctcttttaattcagtaaatagagagatatcagccgcactagcatcccctttcaatagttctccctttttaaaggtatctaatgcggatttagaaaactctctatctcttaatgaatttttaaaatcattatatagtgttgctatctcttgcgcgtattcgcccggatcacgattttgtctttcaggaaagctatcgaacgtaaacgtagtagccatacgtctcagaattctaaatgatgatatacctgtttttatttcagcgagtttagccttttgataaatttcttcttgctttttcgacatattaacgtatcgcattaatactgttttcttagcgaatgatgcagacccttctacgtcatcaaaaatagaaaactcgttattaactatatacgaacatagtcctcctagtttggagactaattctttttcatcgactagacgtttattctcaaatagcgattggtgttgtaaggatcctggtcgtagtaagttaaccaacatggtgaattcttgcacactattgacgataggtgtagccgataaacaaatcatcttatggttttttaacgcaatggtcttagataaaaaattatatactgaacgagtaggacggatcttaccatcttctttgattaatgatttagaaatgaagttatgacattcatcaataatgacgcatattctactcttggaattaatagttttgatattagtaaaaaatttatttctaaaattttgatcatcgtaattaataaaaatacaatccttcgttatctctggagcgtatctgagtatagtgttcatccaaggatcttctatcaaagcctttttcaccaataagataatagcccaattcgtataaatatccttaagatgtttgagaatatatacagtagtcattgttttaccgacacccgtttcatggaacaataaaagagaatgcatactgtctaatcctaagaaaactcttgctacaaaatgttgataatccttgaggcgtactacgtccgaccccatcatttcaacgggcatattagtagttctgcgtaaggcataatcgatataggccgcgtgtgatttactcatttatgagtgataagtaataactatgttttaaaaatcacagcagtagtttaactagtcttctctgatgtttgttttcgatactttttgaatcagaagtcatactagaataaagcaacgagtgaacgtaatagagagcttcgtatactctattcgaaaactctaagaacttattaatgaattccgtatccactggattgtttaaaatactaaattgaacactgttcacatccttccaagaagaagacttagtgacggacttaacatgagacataaataaatccaaattttttttacaaacatcactagccaccataatggcgctatctttcaaccagctatcgcttacgcattttagcagtctaacatttttaaagagactacaatatattctcatagtatcgattacacctctaccgaataaagttggaagtttaataatacaatatttttcgtttacaaaatcaaataatggtcgaaacacgtcgaaggttaacatcttataatcgctaatgtatagattgttttcagtgagatgattattagatttaatagcatctcgttcacgtttgaacagtttattgcgtgcgctgaggtcggcaactacggcgtccgctttagtactcctcccataatactttacgctattaatctttaaaatttcatagactttatctagatcgctttctggtaacatgatatcatgtgtaaaaagttttaacatgtcggtcggcattctatttagatcattaactctagaaatctgaagaaagtaattagctccgtattccagactaggtaatgggcttttacctagagacagattaagttctggcaatgtttcataaaatggaagaaggacatgcgttccctcccggatattttttacaatttcatccatttacaactctatagtttgttttcattattattagttattatctcccataatcttggtaatacttaccccttgatcgtaagataccttatacaggtcattacatacaactaccaattgtttttgtacataatagattggatggttgacatccatggtggaataaactactcgaacagatagtttatctttccccctagatacattagccgtaatagttgtcggcctaaagaatatctttggtgtaaagttaaaagttagggttcttgttccattattgctttttgtcagtagttcattataaattctcgagatgggtccgttctctgaatatagaacatcatttccaaatctaacttctagtctagaaataatatcggtcttattcttaaaatctattcccttgatgaagggatcgttaatgaacaaatccttggcctttgattcggctgatctattatctccgttatagacgttacgttgactagtccaaagacttacaggaatagatgtatcgatgatgttgatactatgtgatatgtgagcaaagattgttctcttagtggcatcactatatgttccagtaatggcggaaaactttttagaaatgttatatataaaagaattttttcgtgttccaaacattagcagattagtatgaagataaacactcatattatcaggaacattatcaatttttacatacacatcagcatcttgaatagaaacgataccatcttctggaacctctacgatctcggcagactccggataaccagtcggtgggccatcgctaacaataactagatcatccaacaatctactcacatatgcatctatataatctttttcatcttgtgagtaccctggatacgaaataaatttattatccgtatttccataataaggtttagtataaacagagagagatgttgccgcatgaacttcagttacagtcgccgttggttggtttatttgacctattactctcctaggtttctctataaacgatggtttaatttgtacattcttaaccatatatccaataaagctcaattcaggaacataaacaaattctttgttgaacgtttcaaagtcgaacgaagagtcacgaataacgatatcggatactggattgaaggttaccgttacggtaatttttgaatcggatagtttaagactgctgaatgtatcttccacatcaaacggagttttaatataaacgtatactgtagatggttctttaatagtgtcattaggagttaggccaatagaaatatcattaagttcactagaatatccagagtgtttcaaagcaattgtattattgatacaattattatataattcttcgccctcaatttcccaaataacaccgttacacgaagagatagatacgtgattaatacatttatatccaacatatggtacgtaactgaatcttcccatacctttaacttctggaagttccaaactcagaaccaaatgattaagcgcagtaatatactgatccctaatttcgaagctagcgatagcctgattgtctggaccatcgtttgtcataactccggatagagaaatatattgcggcatatacaaagttggaatttgactatcgactgcgaagacattagaccgtttaatagagtcatccccaccgatcaaagaattaatgatagtattattcattttctatttaaaatggaaaaagcttacaataaactccgtagagaaatatctataatttgtgagttttccttaaagtaacagcttccgtaaacgccgtctttatctcttagtaggtttattgtatttatgaccttttccttatcttcatagaatactaaaggcaacaaagaaatttttggttcttctctaagagctacgtgagacttaaccatagaagccaacgaatccctacatattttagaacagaaataccctacttcaccacccttgtatgtctcaatactaataggtctaaaaaccaaatcttgattacaaaaccaacacttatcaattacactatttgtcttaatagacacatctgccatagatttataatactttggtagtatacaagcgagtgcttcttctttagcgggcttaaagactgctttaggtgctgaaataaccacatctggaaggcttactcgcttagccatttaattacggaactatttttttatacttctaatgagcaagtagaaaacctctcatctacaaaaacgtactcgtgtccataatcctctaccatagttacacgttttttagatctcatatgtgctaaaaagttttcccatactaattggttactattatttttcgtataatttttaacagtttgaggttttagatttttagttacagaagtgatatcgaatattttatccaaaaagaatgaataattaattgtcttagaaggagtgttttcttggcaaaagaataccaagtgcttaaatatttctactacttcattaatcttttctgtactcagattcagtttctcatcttttacttgattgattatttcaaagactaacttataatcctttttatttattctctcgttagccttaagaaaactagatacaaaatttgcatctacatcatccgtggatatttgatttttttccatgatatccaagagttccgagataatttctccagaacattgatgagacaataatctccgcaatacatttctcaaatgaataagtttattagacacgtggaagtttgactttttttgtacctttgtacatttttgaaataccgactcgcaaaaaatacaatattcatatccttgttcagatactataccgttatgtctacaaccgctacataatcgtagattcatgttaacactctacgtatctcgtcgtccaatattttatataaaaacattttatttctagacgttgccagaaaatcctgtaatatttttagttttttgggctgtgaataaagtatcgccctaatattgttaccgtcttccgccaatatagtagttaaattatccgcacatgcagaagaacaccgcttaggcggattcagtacaatgttatatttttcgtaccaactcatttaaatatcataatctaaaatagttctgtaatatgtctagcgctaatatattgatcataatcctgtgcataaattaagatacaacaatgtctcgaaatcatcgacatggcttcttccatagttagaagatcgtcgtcaaagttagcaacgtgattcatcaacatttgctgttttgaggcagcaaatactgaaccgtcgccattcaaccattcataaaaaccatcgtctgaatccattgataatttcttgtactggtttttgagagctcgcatcaatctagcatttctagctcccggattgaaaacagaaagaggatcgtacatccagggtccattttctgtaaatagaatcgtataatgtcccttcaagaagatatcagacgatccacaatcaaagaattggtctccgagtttgtaacaaactgcggactttaacctatacatgataccgtttagcataatttctggtgatacgtcaatcggagtatcatctattagagatctaaagccggtgtaacattctccaccaaacatattcttattctgacgtcgttctacataaaacatcattgctccattaacgataacaggggaatgaacagcactacccatcacattagttcccaatggatcaatgtgtgtaactccagaacatcttccatagcctatgttaggaggagcgaacaccactcttccactattgccatcgaatgccatagaataaatatccttggaattgatagaaatcggactgtcggatgttgtgatcatcttcataggattaacaactatgtatggtgccgcctgaagtttcatatcgtaactgatgccgtttataggtctagccacagaaaccaacgtaggtctaaatccaactatagacaaaatagaagccaatatctgttcctcatctgtcataacttgagagcatccagtatgaataatcttcattagatggggatctaccgcatcatcatcgttacaataaaaaattcccattctaatgttcataattgcttttctaatcatggtatgcatgtttgctctctgaatctctgtggaaattagatctgatacacctgtaatcactatcggattatcctccgtaagacgattaaccaacaacatataattataagactttacttttctaaattcataaagttgctggattaggctataggtgtctccatgtacatacgcgttctcgagcgcaggaagtttaataccgaatagtgccatcagaataggatgaatatagtaattagtttctggttttctataaataaaagacaaatcttgtgaactagacatatcggtaaaatgcatggattggaatcgtgtagtcgacagaagaatatgatgattagatggagagtatattttatctaactctttgagttggtcaccgattctaggactagctcgagaatgaataagtactaaaggatgagtacatttcacagaaacactagcattgttcaatgtgctctttacatgggtaaggagttgaaatagctcgtttctatttgttctgacaatatttagtttattcataatgttaagcatatcctgaatagtaaagttagatgtgtcatacttgttagtagttagatatttagcaattgcattcccatcatttctcaatctcgtactccaatcatgcgtggatgctacttcgtcgatggaaaccatacaatcctttttgataggctgttgagattgatcatttcctgcacgtttaggtttggtacgttgatttctagcccctgcggatataaagtcatcgtctacaatttgggacaatgaattgcatacactacaagacaaagatttatcagaagtgtgaatatgatcttcatctaccaaagaaagagtttgattagtataactagattttagtcctgcgttagatgttaaaaaaacatcgctattgaccacggcttccattatttatattcgtagtttttactcgaaagcgtgattttaatatccaatcttattacttttggaatcgttcaaaacctttgactagttgtagaatttgatctattgccctacgcgtatactcccttgcatcatatacgttcgtcaccagatcgtttgtttcggcctgaagttggtgcatatctctttcaacattcgacatgagatccttaagggccatatcgtctagattttgttgagatgctgctcctggatttggattttgttgtgctgttgtacatactgtaccaccagtaggtgtaggagtacatacagtggccacaataggaggttgagaaagtgtaaccgttggagtagtacaagaaatacttccatccgattgttgtgtacatgtagttgttggtaacgtctgagaaggttgggtagatggcggcgtcgtcgttttttgatctttattaaatttagagataatatcctgaacagcattgctcggcgtcaacgctggaaggagtgaactcgccggcgcatcagtatcttcagacagccaatcaaaaagattagacatatcagatgatgtattagtttgttgtcgtggttttggtgtaggagcagtactactaggtagaagaataggagccgatgtagctgttggaaccggctgtggagttatatgaatagttggttgtagcggttggataggctgtctgctggcggccatcatattatctctagctagttgttctcgcaactgtctttgataatacgactcttgagactttagtcctatttcaatcgcttcatcctttttcgtatccggatccttttcttcagaataatagattgacgactttggtgtagaggattctgccagcctctgtgagaacttgttaaagaagtccatttaaggctttaaaattgaattgcgattataagattaaatggcagacacagacgatattatcgactatgaatccgatgatctcaccgaatacgaggatgatgaagaagaggaagaagatggagagtcactagaaactagtgatatagatcccaaatcttcttataagattgtagaatcagcatccactcatatagaagatgcgcattccaatcttaaacatatagggaatcatatatctgctcttaaacgacgctatactagacgtataagtctatttgaaatagcgggtataatagcagaaagctataacttgcttcaacgaggaagattacctctagtttcagaattttctgacgaaacgatgaagcaaaatatgctacatgtaattatacaagagatagaggagggttcttgtcctatagtcatcgaaaagaacggagaattgttgtcggtaaacgattttgacaaagatggtctaaaattccatctagactatattatcaaaatttggaaacttcaaaaacgatattagaatttatacgaatatcgttctctaaatgtcacaatcaagtctcgcatgttcagcaatttattgtcgtactttatatcgtgttcattaacgatatcttgcaaaatagtaatgattctatcttccttcgatagatattcttcagagattattgtcttatattctttcttgttatcagatatgaatttgataagactttgaacattattgatacccgtctgtttaattttttctacagatattttagttttggcagattctatcgtatctgtcaatagacatccaacatcgacattcgacgtcaattgtctataaatcaacgtataaattttagaaataacattagcgaattgttgtgcgttgatgtcgttattctgaaacagtatgattttaggtagcattttcttaacaaagagaacgtatttattgttactcagttgaacagatgatatatccagattactaacgcatctgattccgtataccaaactttcagaagaaatggtatacaattgtttgtattcattcaatgtctctttttcagaaattagtttagagtcgaatactgcaataattttcaagagatagttttcatcagataagattttatttagtgtagatatgataaaactattgttttgttggagaacttgatacgccgcgttctctgtagtcgacgctctcaaatgggaaacaatctccattatttttttggaatcggatactatatcttcggtatcttgacgcagtctagtatacatagagttaagagagattagagtttgtacattaagcaacatgtctctaaatgtggctacaaacttttcctttttcacatcatctagtttattatataccgatttcacaacggcaccagatttaaggaaccagaatgaaaaactctgataactacaatatttcatcatagttacgattttatcatcttctatagttggtgtaatagcgcatacctttttctccaagactggaaccaacgtcataaaaatgtttaaatcaaaatccatatcaacatctgatgcgctaagaccagtctcgcgttcaagattatctttactaatggtgacgaactcatcgtataaaactctaagtttgtccattatttatttacagatttagttgtttaatttatttgtgctcttccagagttgggatagtatttttctaacgtcggtattatattattaggatctacgttcatatgtatcataatattaatcatccacgttttgataaatctatctttagcttctgaaataacgtatttaaacaaaggagaaaaatatttagctacggcatcagacgcaataacattttttgtaaatgtaacgtatttagacgacagatcttcgttaaaaagttttccatctatgtagaatccatcggttgttaacaccattcccgcgtcagattgaataggagtttgaatagtttgttttggaaatagatccttcaataacttatagttgggtgggaaaaaatcgattttatcactagactctttcttttttactatcattacctcatgaactatttcttgaatgagtatatgtattttctttcctatatcggacgcgttcattggaaaatataccatgtcgttaactataagaatatttttatcctcgtttacaaactgaataatatcagatgtagttcgtaaacgaactatatcatcaccagcacaacatctaactatatgatatccactagtttcctttagccgtttattatcttgttccatattagcagtcattccatcatttaagaaggcgtcaaaaataatagggagaaatgacattttggattctgttacaactttaccaaaattaaggatatacggacttactatctttttctcaacgtcaatttgatgaacacacgatgaaaatgtgcttctatgagattgatcatgtagaaaacaacaagggatacaatatttccgcatatcatgaaatatattaagaaatcccaccttattatatttccccaaaggatccatgcacgtaaacattatgccgttatcattaataaagacttctttctcatcggatctgtaaaagttgttactgatttttttcattccaggatctagataattaataatgatgggttttctattcttattctttgtattttggcatatcctagaccagtaaacagtttccactttggtaaaatcagcagacttttgaacgctattaaacatggcattaatggcaataactaaaaatgtaaaatatttttctatgttaggaatatggtttttcactttaatagatatatggtttttggccaaaatgatagatatttttttatccgaggatagtaaaatattattagtcgccgtctctataaaaatgaagctagtctcgatatccaattttattctagaattgataggagtcgccaaatgtaccttatacgttatatctcccttgatgcgttccatttgtgtatctatatcggacacaagatctgtaaatagttttacgttattaatcatcacggtatcgccgtcgctagataacgctaatgtaccatccaagtcccaaatggagagatttaactgttcatcgtttagaataaaatgattaccggtcatattaataaagtgttcatcgtatctagataacaacgacttataattaatgtccaagtcttgaactcgctgaatgatcttttttaacccagttagttttagattggtacgaaatatattgttaaactttgattctacagtaatgtccaaatctagttgtggaaatacttccatcaacattgtttcaaacttgataatattattatctacatcttcgtacgatccaaattccggaatagatgtatcgcacgctctggccacccagataaccaaaaagtcacacgctccaggatatacattgtataaaaagctatcgttttttagtagggtttttttctgcgtgtatacgaagggattaaaaatagtattatcaacgtaactatattccaaattattcttatgagaatagataataatatcgtccttaatatctaacaaatttcctaaatatccctttaattgagtcattcgaagcgtcaatagaatatgtctcttaactatttccggctgttgtatatttaaatgacttcgtaaaaaataatatatgggcgacttctcatctatgtaatcatatggagtgagatatagggctcgttctacctcctgccccttacccacctgtaataccaattgcggacttactatatatcgcatatttatatcgtggggtaaagtgaaaatctactaccgatgatgtaagtcttacaatgttcgaaccagtaccagatcttaatttggaggcctccgtagaactaggggaggtaaatatagatcaaacaacacctatgataaaggagaatagcggttttatatcccgcagtagacgtctattcgcccatagatctaaggatgatgagagaaaactagcactacgattctttttacaaagactttattttttagatcatagagagattcattatttgttcagatgcgttgacgctgtaaaagacgtcactattaccaaaaaaaataacattatcgtggcgccttatatagcacttttaactatcgcatcaaaaggatgcaaacttacagaaacaatgattgaagcattctttccagaactatataatgaacatagtaagaaatttaaattcaactctcaagtatccatcatccaagaaaaactcggataccagtttggaaactatcacgtttatgattttgaaccgtattactctacagtagctctggctattcgagatgaacattcatctggcatttttaatatccgtcaagagagttatctggtaagttcattatctgaaataacatatagattttatctaattaatctaaaatctgatcttgttcaatggagtgctagtacgggcgctgtaattaatcaaatggtaaatactgtattgattacagtgtatgaaaagttacaactggtcatagaaaatgattcacaatttacatgttcattggctgtggaatcaaaacttccaataaaattacttaaagatagaaatgaattatttacaaaattcattaacgagttaaaaaagaccagttcattcaagataagcaaacgcgataaggatacgctactaaaatattttacttaggactggagttagaatttatagacgactcatttcgtttatcattgttactattattactattactatcattattagtgttggcattattagtattcttcttgtcatcttgttcagaaatatacagcaatgctatacctaatactaaatacattatcatgctcgcaatggctctaacaacaacgaaccaaaatgaatttggtcgtagcttttgttcacaaaaatacataaagaaatgtctacataaatctatggcgccattggctacttgaaatagcgccagtcctcctacagattttaatatagctgtataacatgacatttattcatcatcaaaagagacagagtcaccatctgtcatatttagattttttttcatgtgttcaaagtatcctctactcatttcattataatagtttatcatacttagaattttaggacggatcaatgagtaagacttgactagatcgtcagtagtaatttgtgcatcgtctattctgcatccgcttcgtcgaataatgtatagcatcgctttgagattctccatagctatcaagtctttatacaatgacatggaaatatctgtgaatactttatacttctccaacatcgatgccttaacatcatcgcctactttagcattgaaaatacgttctattgtgtagatggatgtagcaagatttttaaacaacaatgccatcttacacgatgattgcctcaagtctccaatcgtttgtttagaacgattagctacagagtccaatgcttggctgactagcatattattatctttagaaattgtattcttcaatgaggcgtttatcatatctgtgatttcgttagtcatattacagtctgactgggttgtaatgttatccaacatatcacctatggatacggtacacgtaccagcatttgtaataatcctatctaagatgttgtatggcattgcgcagaaaatatcttctcctgtaatatctccactctcgataaatctactcagattattcttaaatgccttattctctggagaaaagatatcagtgtccatcatttcattaatagtatacgcagaaaagataccacgagtatcaattctatccaagatacttatcggttccgagtcacagataatggtttcctctccttcgggagatcctgcatagaaatatctaggacaatagtttctatactgtctgtaactctgataatctctaaagtcactaactgataccatgaaattgagaagatcaaacgctgaagtaattaatttttctgcctcgtttttactacaactagttttcatcaatgtagtgacgatgtattgtttagttacttttggtctaatactgatgatagagatattattgcttcccataatggatcttctagtagtcaccttaaagcccattgatgcgaatagcagatagataaagtcttggtatgactcctttctaatatagtacggactacctttgtcacccaactttatacccacataagccataacaacctctttaatagccgtttcatgaggtttatcagccatgagcctgagtagttggaagaatctcatgaatcccgtctcagaaagtcctatatgcatgatagatttatctttcctgggaaactctcgtatagtcatagatgaaatactctttaaagtttctgaaataagattagtaacagtcttacctccgactactctaggtaacaaacaaactctaataggtgttttctctgcggagataatatcagaaaggatagagcaataagtagtattattgtgattataaagaccgaatacataacaggtagaatttataaacatcatgtcctgaaggtttttagacttgtattcctcgtaatccataccgtcccaaaacatggatttggtaactttgatagccgtagatctttgttccttcgccaacaggttaaagaaattaataaagaatttgttgtttctatttatgtccacaaattgcacgtttggaagcgccacggttacattcactgcagcattttgaggatcgcgagtatgaagtacgatgttattgtttactggtatatctggaaagaaatctaccagtctaggaataagagattgatatcgcatagaaatagtaaagtttataatctcatcatcgaagagcattttgttaccattgtaataaatatccactctgtcatatgtataaatgaagtactgttcaaacatgatgagatgtttatatgttggcatagtagtgagatcgacgtttggtaatggcaatgtattaagattaactccataatgtctagcagcatctgcgatgttataagcgtcgtcaaagcggggtcgatcttgtattgttatatattgtctaacacctataagattatcaaaatcttgtctgcttaatacaccgttaacaatttttgccttgaattcttttattggtgcattaataacatccttatagaggatgttaaacaaataagtgttatcaaagttaagatctggatatttcttttctgctagaacatccattgagtcggagccatctggtttaatataaccaccgataaatctagctctgtattctgtatccgtcaatctaatattaagaaggtgttgagtgaaaggtggaagatcgtaaaagctgtgagtattaatgataggattagtttccgaactaatgttaattggggtattaataatatctatatttccagcgttaagtgtaacattaaacagttttaattcacgtgacgtggtatcaattaaataattaatgcccaatttggatatagcagcctgaagctcatcttgtttagttacggatcctaatgagttattaagcaatatatcgaacggatgaacgaaggttgttttaagttggtcacatactttgtaatctagacatagatgcggaagaacggtagaaactatacgaaataaatattcagagtcctctaattgatcaagagtaactattgacttaataggcatcatttatttagtattaaatgacgaccgtaccagtgacggatatacaaaacgatttaattacagagttttcagaagataattatccatctaacaaaaattatgaaataactcttcgtcaaatgtctattctaactcacgttaacaacgtggtagatagagaacataatgccgccgtagtgtcatctccagaggaaatatcctcacaacttaatgaagatctatttccagatgatgattcaccggccactattatcgaacgagtacaacctcatactactattattgacgatactccacctcctacgtttcgtagagagttattaatatcggaacaacgtcaacaacgagaaaaaagatttaatattacagtatcgaaaaatgctgaagcaataatggaatctagatctatgataacttctatgccaacacaaacaccatccttgggagtagtttatgataaagataaaagaattcagatgttagaggatgaagtggttaatcttagaaatcaacgatctaatacaaaatcatctgataatttagataattttaccaaaatactatttggtaagactccgtacaaatcaacagaagttaataagcgtatagccatcgttaattatgcaaatttgaacgggtcccccttatcagtcgaggacttggatgtttgttcggaggatgaaatagatagaatctataaaacgattaaacaatatcacgaaagtagaaaacgaaaaattatcgtcactaacgtgattattattgtcataaacattatcgagcaggcattgctaaaactcggatttgaagaaatcaaaggactgagtaccgatatcacttcagaaattatcgatgtggagatcggagatgactgcgatgctgtagcatctaaactaggaatcggtaacagtccggttcttaatattgtattgtttatactcaagatattcgttaaacgaattaaaattatttaatttaatacattcccatatccagacaacaatcgtctggattaatctgttcctgtcgtctcataccggacgacatattaatctttttattagtgggcatctttttagatggtttctttttcccagcattaactgagtcgatacctagaagatcgtgattgatctctccgaccattccacgaacttctaattggccgtctctgacggtaccataaactattttaccagcattagtaacagcttggacaatctgaccatccatcgcattgtacgatgtagtagtaactgttgttctacgtctaggagcaccagaagtatttttggagcccttggatgttgatgtagaagaagacgaggattttgattttggtttacatgtaatacattttgaactctttgattttgtatcacatgcgccggcagtcacatctgtttgagaattaagattattgttgcctcctttgacggctgcatctccaccgatttgcgctagtagatttttaagctgtggtgtaatcttattaactgtttcgatataatcatcgtaactgcttctaacggctaaattttttttatccgccatttagaagctaaaaatatttttatttatgcagaagatttaactagattatacaatgaactaatatgatccttttccagattatttacaaacttggtattttttggttctggaggaggcgaatttaaattcggacttggattcggattttgtaagttcttgatcttattatacatcgagtataggatggcgacagtaactgctacacaaataccgatcaaaagaagaataccaatcatttattgacaataacttcactattgatcaagtatgcaatatatcatcttttcactaaataagtagtaataatgattcaacaatgtcgagatatatggacgataataatttagttcatggaaatatcgctatgattggtgtgaatgactccgctaactctgtggggtgcgcagtgctttccccacatagaataaattagcattccgactgtgataataataccaagtataaacgccataatactcaatactttccatgtacgagtgggactggtagacttactaaagtcaataaaggcgaagatacacgaaagaatcaaaagaatgattccagcgattagcacgccggaaaaataatttccaatcataagcatcatgtccatttaactaataaaaattttaaatcgccgaatgaacaaagtggaatataaaccatataaaaacaatagtttgtactgcaaaaataatatctatttttgttttcgaagatatggtaaaattaaatagtagtacacagcatgttataactaacagcagcaacggctcgtaattacttatcatttactagacgaaaaggtggtgggatattttcttgctcaaataatacgaatatatcacccatccattttatgcgatgtttatatactctaatctttaatagatctatagacgacgggtttaccaacaatatagattttatcgattcatctaatttaaacccttccttaaacgtgaatgatctattatctggcataacgatgaccctacctgatgaatcggacaatgtactgggccatgtagaataaattatcaacgaattatcgtctacgaacatttatatcatttgttttaattttaggacgcgaataaatggatataaaatagaaaataacagatattacaaccagtgttatggccgcgcccaaccaggtaggcagttttattttatcttttactacaggttctcctggatgtacgtcaccaacggcggacgtagttctagtacaattagacgtaagttccgcttgggaattttttaacgctaaagagttaacgttaatcgtgcacccaacgtatttacatctagttcgttgaacatcttgattataatataaccattttctatctctagattcgtcagtgcactcatgtaaccaacataccctaggtcctaaatatttatctccggaattagattttggataattcgcgcaccaacaatttctatttcctttatgatcgttacaaaagacgtataatgccgtatccccaaaagtaaaataatcaggacgaataattctaataaactcagaacaatatctcgcatccatatgtttggagcaaatatcggaataagtagacatagccggtttccgttttgcacgtaaccattctaaacaattggggtttccaggatcgtttctacaaaatccagtcatgaaatcgtcacaatgttctgtcttgtaattattattaaatatttttggacagtgtttggtatttgtcttagaacaacattttgccacgctatcactatcgcccaggagataatccttttttataaaatgacatcgttgcccggatgctatataatcagtagcgtgttttaaatccttaatatattcaggagttacctcgttctgataatagattaatgatccaggacgaaatttgaaagaactacatggttctccatgaattaatacatattgtttagcaaattcaggaactataaaactactacaatgatctatcgacataccatctatcaaacaaaacttgggtttaatttctcccggagatgtttcataatagtacgtataactttcttctgcaaacttaacagctctattatattcaggataattaaaacctaattccatatatttgtctcgtatatctgctattcctggtgctattttgattctattaagagtaacagctgcccccattcttaataatcgtcagtatttaaactgttaaatgttggtatatcaacatctaccttatttcccgcagtataaggtttgttgcaggtatactgttcaggaatggttacatttatacttcttctatagtcctgtctttcgatgttcatcacatatgcaaagaacagaataaacaaaataatgtaagaaataatattaaatatctgtgaattcgtaaatacattgattgccataataattacagcagctacaatacacacaatagacattcccacagtgttgccattacctccacgatacatttgagttactaagcaataggtaataactaagctagtaagaggcaatagaaaagatgagataaatatcatcaatatagagattagaggagggctatatagagccaagacgaacaaaatcaaaccgagtaacgttctaacatcattatttttgaagattcccaaataatcattcattcctccataatcgttttgcatcatacctccatctttaggcataaacgattgctgctgttcctctgtaaataaatctttatcaagcactccagcacccgcagagaagtcgtcaagcatattgtaatatcttaaataactcatttatatattaaaaaatgtcactattaaagatggagtataatctttatgccgaactaaaaaaaatgacttgtggtcaacccctaagtctttttaacgaagacggggatttcgtagaagttgaaccgggatcatcctttaagtttctgatacctaagggattttacgcctctccttccgtaaagacgagtctagtattcgagacattaacaacgaccgataataaaatcactagtatcaatccaacaaatgcgccaaagttatatcctcttcaacgcaaagtcgtatctgaagtagtttctaatatgaggaaaatgatcgaatcaaaacgtcctctatacatcactcttcacttggcgtgtggatttggtaagactattaccacgtgttatcttatggctacacacggtagaaaaaccgtcatttgcgtacccaataaaatgttaatacatcaatggaagacacaggtagaggcagtcggattggaacataagatatccatagatggagtaagtagtctattaaaggaactaaagactcaaagtccggatgtattaatagtagtcagtagacatctgacaaacgatgccttttgtaaatatatcaataagcattatgatttgttcatcttggatgaatcacatacgtataatctgatgaacaatacagcagttacaagatttttagcgtattatcctccgatgatgtgttattttttaactgctacacctagaccatctaaccgaatttattgtaacagtattattaatattgccaagttatccaatctaaaaaaaactatctatgcagtagatagtttttttgagccatattccacagataatattagacatatggtaaaacgactagatggaccatctaataaatatcatatatataccgagaagttattatctgtagacgagcctagaaatcaacttattcttgataccctggtagaagaattcaagtcaggaactattaatcgcattttagttattactaaactacgtgaacatatggtattattctacaaacgattattagattttttcggaccagaggttgtatttataggagacgcccaaaatagacgtactccagatatggtcaaatcaatcaaggaactaaatagatttatattcgtatccaccttattttattccggtactggtttagatattcctagtttggattcgttgttcatttgctcggcagtaatcaacaatatgcaaatagagcaattactagggagggtatgtcgagaaacagaactattagataggacggtatatgtatttcctaacacatccatcaaagaaataaagtacatgataggaaatttcatgcaacgaattattagtctgtctgtagataaactaggatttaaacaaaaaagttatcggaaacatcaagaatccgatcccacttctgcatgtacaacatcatccagagaagaacgtgtattaaatagaatatttaactcgcaaaatcgttaagaagtttaagcgacgatccgcatgctgcgcaggccagtgtattacccctcatagtattaatataatccaatgatacttttgtgatgtcggaaatcttaaccaatttagactgacaggcagaacacgtcatgcaatcatcatcgtcatcgataactgtagtcttgggcttctttttgcgactcttcattccggaacgcacattggtgctatccatttaggtagtaaaaaataagtcagaatatgccctataacacgatcgtgcaaaacctggtatatcgtctctatctttatcacaatatagtgtatcgacatttttattattattgacctcgtttatcttggaacatggaatgggaacatttttgttatcaacggccatctttgccttaattccagatgttgtaaaattataactaaacagtctatcatcgacacaaatgaaattcttgtttagacgtttgtagtttacgtatgcggctcgttcgcgtctcattttttcagatattgcaggtactataatattaaaaataagaatgaaataacataggattaaaaataaagttatcatgacttctagcgctgatttaactaacttaaaagaattacttagtctgtacaaaagtttgagattttcagattctgcggctatagaaaagtataattctttggtagaatggggaacatctacttactggaaaataggcgtgcaaaaggtagctaatgtcgagacgtcaatatctgattattatgatgaggtaaaaaataaaccgtttaatattgatccgggctattacattttcttaccggtatattttgggagcgtctttatttattcgaagggtaaaaatatggtagaacttggatctggaaactcttttcaaataccagatgatatgcgaagtgcgtgtaacaaagtattagacagcgataacggaatagactttctgagatttgttttgttaaacaatagatggataatggaagatgctatatcaaaatatcagtctccagttaatatatttaaactagctagtgagtacggattaaacatacccaaatatttagaaattgaaatagaggaagacacattatttgacgacgagttatactctattatagaacgctctttcgatgataaatttccaaaaatatccatatcgtatattaagttgggagaacttagacggcaagttgtagactttttcaaattctcattcatgtatattgagtccatcaaggtagatcgtataggagataatatttttattcctagcgttataacaaaatcaggaaaaaagatattagtaaaagatgtagaccatttaatacgatccaaggttagagaacatacatttgtaaaagtaaaaaagaaaaacacattttccattttatacgactatgatggaaacggaacagaaactagaggagaagtaataaaacgaattatagacactataggacgagactattatgttaacggaaagtatttctctaaggttggtagtgcaggcttaaagcaattgactaataaattagatattaatgagtgcgcaactgtcgatgagttagttgatgagattaataaatccggaactgtaaaacgaaaaataaaaaaccaatcagcatttgatttaagcagagaatgtttgggatatccagaagcggattttataacgttagttaataacatgcggttcaaaatagaaaattgtaaggttgtaaatttcaatattgaaaatactaattgtttaaataacccgagtattgaaactatatatggaaactttaaccagttcgtctcaatctttaatgtcgtcaccgatgtcaaaaaaagattattcgagtgaaataatatgcgcctttgatataggtgcaaaaaatcctgccagaactgttttagaagtcaaggataactccgttagggtattggatatatcaaaattagactggagttctgattgggaaaggcgcatagctaaagatttgtcacaatatgaatacactacagttcttctagaacgtcagcctagaaggtcgccgtatgttaaatttatctattttattaaaggctttttatatcatacatcggctgccaaagttatttgcgtctcgcctgtcatgtctggtaattcatatagagatcgaaaaaagagatcggtcgaagcatttcttgattggatggacacattcggattgcgagactccgttccggatagacgcaaattagacgatgtagcggatagtttcaatttggctatgagatacgtattagataaatggaatactaattatacaccttataataggtgtaaatctagaaattacataaaaaaaatgtaataacgttagtaacgccattatggataatctatttacctttctacatgaaatagaagatagatatgccagaactatttttaactttcatctaataagttgcgatgaaataggagatatatatggtcttatgaaagaacgcatttcctcagaggatatgtttgataatatagtgtataataaagatatacatcctgccattaagaaactagtgtattgcgacatccaacttactaaacacattattaatcagaatacgtatccggtatttaacgattcttcacaagtgaaatgttgtcattatttcgacataaactcagataatagcaatattagctctcgtacagtagagatatttgagagggaaaagtcatctcttgtatcatatattaaaactaccaataagaagagaaaggtcaattacggcgaaataaagaaaactgttcatggaggcactaatgcaaattacttttccggtaaaaagtctgacgagtatctgagtactacagttagatccaacattaatcaaccttggatcaaaaccatctctaagaggatgagagttgatatcattaatcactctatagtaacgcgtggaaaaagctctatattacaaactatagaaattatttttactaatagaacatgtgtgaaaatattcaaggattctactatgcacattattctatccaaggacaaggatgaaaaggggtgtatacacatgattgacaaattattctatgtctattataatttatttctgttgttcgaagatatcatccaaaacgagtactttaaagaagtagctaatgttgtaaaccacgtactcacggctacggcattagatgagaaattattcctaattaagaaaatggctgaacacgatgtttatggagttagcaatttcaaaatagggatgtttaacctgacatttattaagtcgttggatcataccgttttcccctctctgttagatgaggatagcaaaataaagttttttaaggggaaaaagctcaatattgtagcattacgatctctggaggattgtataaattacgtgactaaatccgagaatatgatagaaatgatgaaggaaagatcgactattttaaatagcatagatatagaaacggaatcggtagatcgtctaaaagaattgcttctaaaatgaaaaaaaacactaattcagaaatggatcaacgactagggtataagtttttggtgcctgatcctaaagccggagttttttatagaccgttacatttccaatatgtatcgtattctaattttatattgcatcgattgcatgaaatcttgaccgtcaagcggccactcttatcgtttaagaataatacagaacgaattatgatagaaattagcaatgttaaagtgactcctccagattactcacctataatcgcgagtattaaaggtaagagttatgacgcattagccacgttcactgtaaatatctttaaagaggtaatgaccaaagagggtatatccatcactaaaataagtagttatgagggaaaagattctcatttgataaaaattccgctactaataggatacgggaataaaaatccacttgatacagccaagtatcttgttcctaatgtcataggtggagtctttatcaataaacaatctgtcgaaaaagtaggaattaatctagtagaaaagattacaacatggccaaaatttagggttgttaagccaaactcattcactttctcgttttcctccgtatcccctcctaatgtattaccgacaagatatcgccattacaagatatctctggatatatcacaattggaagcgttgaatatatcatcgacaaagacatttataacggtcaatattgttttgctgtctcaatatttatctagagtgagtctagaattcattagacgtagtttatcatacgatatgcctccagaagttgtctatctagtaaacgcgataatagatagtgctaaacgaattactgaatctattactgactttaatattgatacatacattaatgacctggtggaagctgaacacattaaacaaaaatctcagttaacgatcaacgagttcaaatatgaaatgctgcataactttttacctcatatgaactatacacccgatcaactaaagggattttatatgatatctttactaagaaagtttctctactgtatcttccacacttctagatatccagatagagattcgatggtttgtcatcgcatcctaacgtacggcaaatattttgagacgttggcacatgatgaattagagaattacataggcaacatccgaaacgatatcatgaacaatcacaagaacagaggcacttacgcggtaaacattcatgtactaacaactcccggacttaatcacgcgttttctagcttattgagtggaaagttcaaaaagtcagacggtagttatcgaacacatcctcactattcatggatgcagaatatttctattcctaggagtgttggattttatccggatcaagtaaagatttcaaagatgttttctgtcagaaaataccatccaagtcaatatctttacttttgttcatcagacgttccggaaagaggtcctcaggtaggtttagtatctcaattgtctgtcttgagttccattacaaatatactaacgtctgagtatttggatttggaaaagaaaatttgtgagtatatcagatcatattataaagatgatataagttactttgaaacaggatttccaatcactatagaaaatgctctagtcgcatctcttaatccaaatatgatatgtgattttgtaactgactttagacgtagaaaacggatgggattcttcggtaacttggaggtaggtattactttagttagggatcacatgaatgaaattcgcattaatattggagcgggaagattagtcagaccattcttggttgtggataacggagagctcatgatggatgtgtgtccggagttagaaagcagattagacgacatgacattctctgacattcagaaagagtttccgcatgtcatcgaaatggtagatatagaacaatttacttttagtaacgtatgtgaatcggttcaaaaatttagaatgatgtcaaaggatgaaagaaagcaatacgatttatgtgactttcctgccgaatttagagatggatatgtagcatcttcattagtgggaatcaatcacaattctggacccagagctattcttggatgtgctcaagctaaacaagctatctcttgtctgagctcggatatacgaaataaaatagacaatggaattcatttgatgtatccagagaggccaatcgtgattagtaaggctttagaaacttcaaagattgcggctaattgcttcggccaacatgttactatagcattaatgtcgtacaaaggtatcaatcaagaggatggaattatcatcaaaaaacaatttattcagagaggcggtctcgatattgttacagccaagaaacatcaagtagaaattccattggaaaactttaataacaaagaaagagataggtctaacgcctattcaaaattagaaagtaatggattagttagactgaatgctttcttggaatccggagacgctatggcacgaaatatctcatcaagaactcttgaagatgattttgctagagataatcagattagcttcgatgtttccgagaaatataccgatatgtacaaatctcgcgttgaacgagtacaagtagaacttactgacaaagttaaggtacgagtattaaccatgaaagaaagaagacccattctaggagacaaatttaccactagaacgagtcaaaagggaacagtcgcgtatgtcgcggatgaaacggaacttccatacgacgaaaatggtatcacaccagatgtcattattaattctacatccatcttctctagaaaaactatatctatgttgatagaagttattttaacagccgcatattctgctaagccgtacaacaataagggagaaaaccgacctgtctgttttcctagtagtaacgaaacatccatcgatacatatatgcaattcgctaaacaatgttatgagcattcaaatccgaaattgtccgatgaagaattatcggataaaatcttttgtgaaaagattctctatgatcctgaaacggataagccttatgcatccaaagtattttttggaccaatttattacttgcgtctgaggcatttaactcaggacaaggcaaccgttagatgtagaggtaaaaagacgaagctcattagacaggcgaatgagggacgaaaacgtggaggaggtatcaagttcggagaaatggagagagactgtttaatagcgcatggtgcagccaatactattacagaagttttgaaagattcggaagaagattatcaagatgtgtatgtttgtgaaaattgtggagacatagcagcacaaatcaagggtattaatacatgtcttagatgttcaaaacttaatctctctcctctcttaacaaaaattgataccacgcacgtatctaaagtatttcttactcaaatgaacgccagaggcgtaaaagtcaaattagatttcgaacgaaggcctccttcgttttataaaccattagataaagttgatctcaagccgtcttttctggtgtaatattctagtttggtagtagatacatatcaatatcatcaaattcgagatccgaattataaaatgggcgtggattgttaactatagaatcggacgtctgatattcgaaaatctgtggagtttcaggttttggtggaggtgtaactgctacttgggatactgaagtctgatattcagaaagctgtggatgttctggttcggcatccaccgatggtgtcacatcactaatcggttcggtaacgtctgtggatggaggtgctacttctacagaacctgtagcctcagttgtcaacggagatacatttttaatgcgagaaaatgtataatttggtaatggtttcttatgtggatctgaagaagaggtaagatatctactagaaagataccgatcacgttctagttctcttttgtagaacttaactttttctttctccgcatctagttgatattccaacctcttcacgttactacgttcagattccaattcacgttcgcatgggttacctccgcagtttttacgagcgatttcacgttcagccttcatgcgtctctccctctctctatcgagtttatcagagcagtctttctgaaggcgatcgaactccataaatttctccaacgctttgattgtttccatagatttccgaagttcagcttttaggactgtgattctttttctttcgaattcacagctggatgtacaaccgtttccattaccgccatctctaagtttcttttctagatcggcaacatttcatccccatgccttttacattcctcgagtctactgtcgtcgaaatatcgttccagctccttttcgacatcaataactttagcacgttgtctctcaagctctcttttgtagttatctgattccctggcacgtttaagatcttcatgcaattgagtcagctcttaacttcctctcttgcttcttcgtcatagtacgcgcaatcactgtgagatccattgttaccacgtctacactcggcgagctcgcgtttaagagattcaatttcccgtttgtattggtccatgtttccattgctaccaccattagatttacaggctgctagttgtcgttcgagatcagaaatacgggttttcttggaattgatttcgtcgatgtacttggcatcgaaacacttattaagttctttttccaattctacgattttatttctttcgcgagtcaattccctcctgtagtaactatctgttttgtcagattcacgctctctacgtagactttcttgcaagttactaatttgttccctagcacgtccgagtttagttttatatgctgaatagagttctgattcatcctttgagcagatctctagcgatcgtttaagattcctaattctagtctttagcctatttacctcctcagaagatgttccgttaccgttgcgtttacactcgttaagctgtctatcaagatccatgattctatctctaagacgttgcatctctctttccatatcagcattgctttcattattacgtctgcagtcactcaactgtctttcaatatctgagattctatctctaagacgtcgcatctctctctgtttcggcattggtttcattattacgtttacagtcgttcaactgtctttcaagatctgatattctagattggagtctgctaatctctgtagcattttcacggcattcactcagttgtctttcaagatctgaaattttagattggagtctgctaatctctgtaagatttcctcctccgctctcgatgcagtcggtcaacttattctctagttctctaatacgcgaacgcagtgcatcaacttcttgcgtgtcttcctggttgcgtgtacattcatcgagatctctaacgcgtcgtcgttcttcctcaagttctctgcgtactacagaaagcgtgtccctatcttgttgatatttagcaatttctgattctagagtactgattttgcttacgtagttactaatagttgtcttggccttatcaagatcctccttgtatttgtcgcattccttgatatccctacgaagtctggacagttcccattcgacattacgacgtttatcgatttcagctcggagatcgtcatcgcgttgttttagccacatacgactgagttcaagttctcgttgacaagatccatctacttttccattcctaatagtatccagttccttttctagttctgaacgcatttctcgttccctatcaagcgattctctcaattctcggatagtcttcttatcaatttctaataaatctgaaccatcatctgtcccattttgaatatccctgtgttctttgatctcttttgtaagtcggtcgattctttcggttttataaacagaatccctttccaaagtcctaatcttactgagtttatcactaagttctgcattcaattcggtgagttttctcttggcttcttccaactctgttttaaactctccactatttccgcattcttcctcgcatttatctaaccattcaattagtttattaataactagttggtaatcagcgattcctatagccgttcttgtaattgtgggaacataattaggatcttctaatggattgtatggcttgatagcatcatctttatcattattagggggatggacaaccttaattggttggtcctcatctcctccagtagcgtgtggttcttcaataccagtgttagtaataggcttaggcaaatgcttgtcgtacgcgggcacttcctcatccatcaagtatttataatcgggttctacttcagaatattcttttctaagagacgcgacttcgggagttagtagaagaactctgtttctgtatctatcaacgctggaatcaatactcaagttaaggatagcgaatacctcatcgtcatcatccgtatcttctgaaacaccatcatatgacatttcatgaagtctaacgtattgataaatagaatcagatttagtattaaacagatccttaacctttttagtaaacgcatatgtatattttagatctccagatttcataatatgatcacatgccttaaatgtcagtgcttccatgatataatctggaacactaatgggtgacgaaaaagatacagcaccatatgctacgttgataaataaatctgaaccactaagtagataatgattaatgttaagaaagaggaaatattcagtgtataggtatgtcttggcgtcatatcttgtactaaacacgctaaacagtttgttaatgtgatcaatttccaatagattaattagagcagcgggaataccaacaaacatattaccacatccgtattttctatgaatatcacatatcatgttaaaaaatcttgatagaagagcgaatatctcgtctgacttaatgagtcgtagttcagcagcaacataagtcataactgtaaatagaacatactttcctgtagtgttgattctagactccacatcaacaccattattaaaaatagttttatatacatctttaatctgctctccgttaatcgtcgaacgttctagtatacggaaacactttgatttcttatctgtagttaatgacttagtgatatcacgaagaatattacgaattacatttcttgtttttcttgagagacctgattcagaactcaactcatcgttccatagtttttctacctcagtggcgaaatctttggagtgcttggtacatttttcaataaggttcgtgacctccatttattataaaaaatttattcaaaacttaactacaatcgggtaattataagatcgtagatctcccatgtggcggaatactaccatctatcgcatgtggatggacagtaggtaatggccatgggaacagtaatgtttgcatatttatctttcttgctagtattactgcatattgtcccaatgtttcgatgtgatgttctaacctatcaactgccgctgtatcacaacaatagtgtccgatgaaattaagattatgatccaatgtgtttaatatatgattatcaagtcttatacgatccgcgtcttttttgacaggatcaggttcttctacaggaagaagtttcggcctcttatgatattcatgtctgggaaacggtggtctagggtgaggctccggtatcggagtgggttttggattataatcatcatcgtctatgacatcatcttcgacttcgatatttattttgctatcttgatgatgtcctgtatcagttgcattttcagcactcgactgaatattagcgcattcattgtctattattaccatatttctaaacccaaaatgtatgtgttgaacatcagtactatcgttgatgagtcttatagcatgaattcgcttatcgttatcgggtttatcttctgtcaccttagcaattccttttttattaaactctacataatcatatccatttctattgtttgttctaatataaacgagtatagcatcattgctaaatttttcaatagtatcaaaaacagaatatcctaaaccatataatatatattcaggaacactcaaactaaatgtccaggattctcctaaatacgtaaactttaatagtgcgaaatcattcaaaaatctaccacttatagatagatagtacataaatgcgtatagtagtctacctatctctttattatgaaaaccggcattacgatcatatatgtcgtgatatacctgtgatccgtttacgttaaaccataaatacatgggtgatcctataaacatgaatttatttctaattctcagagctatagttaattgaccgtgtaatatttgcttacatgcatacttgatacgcttattaataagatttttatcattgctcgttatttcagaatcgtatatataaggagtaccatcgtgattcttaccagatattatacaaaatactatatataaaatatattgacccacgttagtaatcatataaatgtttaacgttttaaattttgtattcaatgatccattatcatacgctatcatggtcttgtaatattcattctttaaaatataatattgtgttagccattgcattggagctcctaatggagattttctattctcatccattttaggataggctttcataaagtccctaataacttcgtgaataatgtttctatgttttctactgatgcatgtatttgcttcgatttttttatcccatgtttcatctatcatagatttaaacgcagtaatgctcgcaacattaacatcttgaaccgttggtacaattccgttccataaatttataatgttcgccatttatataactcattttttgaatatacttttaattaacaaaagagttaagttactcatatggacgccgtccagtctgaacatcaatctttttagccagagatatcatagccgctcttagagtttcagcgtgattttccaacctaaatagaacttcatcgttgcgtttacaacacttttctatttgttcaaactttgttgttacattagtaatctttttttccaaattagttagccgttgtttgagagtttcctcattgtcgtcttcatcggctttaacaattgcttcgcgtttagcctctggctttttagcagcctttgtagaaaaaaattcagttgctggaattgcaagatcgtcatctccggggaaaagagttccgtccatttaaagtacagattttagaaactgacactctgcgttatttatatttggtacaacacatggattataaatattgatgttaataacatcagaaaatgtaaagtctatacattgttgcatcgtgttaaattttctaatggatctagtattattgggtccaacttctgcctgaaatccaaatatggaagcggatacaaaaccgtttcctggataaaccacacatctccacttttgctttacatcagaaattgtgtcgttgacatcttgaactctcctatctaatgccggtgttccacctatagattttgaatattcgaatgctgcatgagtagcattaaattccttaatattgccataattttcatatattgagtaaccctggataaaaagtaaacacaccgcagccgtcgctaccacaataaaaaaaattgatagagagttcatttataatctattagaagctgacaaaatttttttacacgcatcagacaatgctttaataaatagttcaacatctacttttgtcatatcgaaccgatggtatgattctaacctagaattacatccgaaaaagttgactatgttcatagtcattaagtcattaacaaacaacattccagactctggattataagacgatactgtttcgtcacaattacctaccttaatcatgtgattatgaatattggctattagagcaccttctaagaaatctataatatctttgaaacacgatttaaaatcaaaccacgaatatacttctacgaagaaagttagtttacccataggagaaataactataaatggagatctaaatacaaaatccggatctatgatagttttaacattattatattctctattaaatacctccacatctaaaaatgttaattttgaaactatgtcttcgtttattaccgtacctgaactaaacgctataagctctattgtttgagaactctttaaacgatattcttgaaatacatgtaacaaagtttcctttaactcggtcggtttatctaccatagttacagaatttgtatccttatctataatataataatcaaaatcgtataaagttatataattatcgcgttcagattgtgatcttttcaaatagactaaaaaccccatttctctagtaagtatcttatgtatatgtttgtaaaatatcttcatggtgggaatatgctctaccgcagttagccattcctcattgacagcggtagatgtattagacaaaactattccaatgtttaacaagggccattttacgagattattaaatccttgtttgataaatgtagccaatgagggttcgagttcaacgacgattgaattctcttcccgcggatgctgcatgatgaacgacgggatgttgttcgattgatttggaattctttttcgactttttgtttatattaaatattttaaaatttatagcggatagcaattcatgtaccacggataatgtagacgcgtattgcgcatcgatatctttattattagataaatttatcaataaatgtgagaagtttgcctcgttaaggtcttccatttaaatattatataaacatttgtgtttgtatcttattcgtcttttatggaatagttttttactagtaaagctgcaattacacactttgtccgtaaaacataaatataaacaccagcttttatcaatcgttccaaaaagtcgacggcggacatttttaacatggcatctattttaaatacacttaggtttttggaaaaaacatcattttataattgtaacgattcaataactaaagaaaagattaagattaaacataagggaatgtcatttgtattttataagccaaagcattctaccgttgttaaatacttgtctggaggaggtatatatcatgatgatttggttgtattggggaaggtaacaattaataatctaaagatgatgctattttacatggatttatcatatcatggagtgacaagtagtggagcaatttacaaattgggatcgtctatcgatagactttctctaaataggactattgttacaaaagttaataattatgatgatacattttttgacgacgatgattgatcgctattgcacaattttgtttttgtactttctaatatagtgtttaggttctttttcatatgagaatattgatttactaaaatatctatgtttaacttttgttctatgacgtccttatcggcggtatcggtacatatacgtaattcaccttcacaaaatacggagtcttcgataataatagccaatcgattattggatctagctgtctgtatcatattcaacatgtttaatatatcctttcgtttcccctttacaggcatcgatcgtagcatattttccgcgtctgatatggaaatgttaaaactacaaaaatgcgtaatgttagcccgtcctaatattggtacgtgtctataagtttggcatagtagaataatagacgtgtttaaatgccttccaaagtttaagaattctattagagtattgcattttgatagtttatcgcctacatcatcaaaaataagtaaaaagtgtgctgattttttatgattttgtgcgacagcaatacatttttctatgttacttttagttcgtatcagattatattctagagattcctgactactaacgaaattaatatgatttggccaaatgtatccatcataatctgggttataaacgggtgtaaacaagaatatatgtttatattttttaactagtgtagaaaacagagatagtaaatagatagtttttccagatccagatcctcctgttaaaaccattctaaacggcatttttaataaattttctcttgaaaattgtttttcttggaaacaattcataattatatttacagttactaaattaatttgataataaatcaaaatatggaaaactaaggttgttagtagggaggagaacaaagaaggcacatcgtgatataaataacatttattatcatgatgacaccagaaaacgacgaagagcagacatctgtgttctccgctactgtttacggagacaaaattcagggaaagaataaacgcaaacgcgtgattggtctatgtattagaatatctatggttatttcactactatctatgattaccatgtccgcgtttctcatagtgcgcctaaatcaatgcatgtctgctaacgaggctgctattactgacgccgctgttgccgttgctgctgcatcatctactcatagaaaggttgcgtctagcactacacaatatgatcacaaagaaagctgtaatggtttatattaccagggttcttgttatatattacattcagactaccagttattctcggatgctaaagcaaattgcactgcggaatcatcaacactacccaataaatccgatgtcttgactacctggctcattgattatgttgaggatacatggggatctgatggtaatccaattacaaaaactacatccgattatcaagattctgatgtatcacaagaagttagaaagtatttttgtgttaaaacaatgaactaatatttatttttgtacattaataaatgaaatcgcttaatagacaaactgtaagtaggtttaagaagttgtcggtgccggccgctataatgatgatactctcaaccattattagtggcataggaacatttctgcattacaaagaagaactgatgcctagtgcttgcgccaatggatggatacaatacgataaacattgttatttagatactaacattaaaatgtctacagataatgcggtttatcagtgtcgtaaattacgagctagattgcctagacctgatactagacatctgagagtattgtttagtattttttataaagattattgggtaagtttaaaaaagaccaatgataaatggttagatattaataatgataaagatatagatattagtaaattaacaaattttaaacaactaaacagtacgacggatgctgaagcgtgttatatatacaagtctggaaaactggttaaaacagtatgtaaaagtactcaatctgtactatgtgttaaaaaattctacaagtgacaacaaaaaatgaattaataataagtcgttaacgtacgccgccatggacgccgcgtttgttattactccaatgggtgtgttgactataacagatacattgtatgatgatctcgatatctcaatcatggactttataggaccatacattataggtaacataaaaactgtccaaatagatgtacgggatataaaatattccgacatgcaaaaatgctactttagctataagggtaaaatagttcctcaggattctaatgatttggctagattcaacatttatagcatttgtgccgcatacagatcaaaaaataccatcatcatagcatgcgactatgatatcatgttagatatagaagataaacatcagccattttatctattcccatctattgatgtttttaacgctacaatcatagaagcgtataacctgtatacagctggagattatcatctaatcatcaatccttcagataatctgaaaatgaaattgtcgtttaattcttcattctgcatatcagacggcaatggatggatcataattgatgggaaatgcaatagtaattttttatcataaaagttgtaaagtaaataataaaacaataaatattgaactagtagtacgtatattgagcaatcagaaatgatgctggtacctcttatcacggtgaccgtagttgcgggaacaatattagtatgttatatattatatatttgtaggaaaaagatacgtactgtctataatgacaataaaattatcatgacaaaattaaaaaagataaagagttctaattccagcaaatctagtaaatcaactgatagcgaatcagactgggaggatcactgtagtgctatggaacaaaacaatgacgtagataatatttctaggaatgagatattggacgatgatagcttcgctggtagtttaatatgggataacgaatccaatgttatggcgcctagcacagaacacatttacgatagtgttgctggaagcacgctgctaataaataatgatcgtaatgaacagactatttatcagaacactacagtagtaattaatgaaacggagactgttgaagtacttaatgaagataccaaacagaatcctaactattcatccaatcctttcgtaaattataataaaaccagtatttgtagcaagtcaaatccgtttattacagaacttaacaataaatttagtgagaataatccgtttagacgagcacatagcgatgattatcttaataagcaagaacaagatcatgaacacgatgatatagaatcatcggtcgtatcattggtgtgattagtttcctttttataaaattgaagtaatatttagtattattgctgccgtcacgttgtacaaatggagatattccctgtattcggcatttctaaaattagcaattttattgctaataatgactgtagatattatatagatacagaacatcaaaaaattatatctgatgagatcaatagacagatggatgaaacggtacttcttaccaacatcttaagcgtagaagttgtaaatgacaatgagatgtaccatcttattcctcatagattatcgacgattatactctgtattagttctgtcggaggatgtgttatctctatagataatgacatcaatggcaaaaatattctaacctttcccattgatcatgctgtaatcatatccccactgagtaaatgtgtcgtagttagcaagggtcctacaaccatattggttgttaaagcggatatacctagcaaacgattggtaacatcgtttacaaacgacatactatatgtaaacaatctgtcactgattaattatttgccgttgtctgtattcattattagacgagtcaccgactatttggatagacacatatgcgatcagatatttgctaataataagtggtattcccttataaccatcgacgataagcaatatcctattccatcaaactgtataggtatgtcctctgccaagtacataaattctagcatcgagcaagatactttaatccatgtttgtaacctcgagcatccgttcgactcagtatacaaaaaaatgcagtcgtacaattctctacctatcaaggaacaaatattgtacggtagaattgataatataaatatgagcattagtatttctgtggattaatagatttctagtatggggatcattaatcatctctaatctctaaatacctcataaaacgaaaaaaaagctattatcaaatactgtacggaatggattcattctcttctctttttatgaaactctgttgtatatctactgataaaactggaagcaaaaaatctgatagaaagaataagaataagatcaaggattatatggaacacgattattataaaataacaatagttcctggttcctcttccacgtctactagctcgtggtattatacacatgcctagtaatagtctctttgcgttgacggaaagcagactagaaataacaggctaaaatgttcagacaccataatagttcccaacccagataataacagagttccatcaacacattcctttaaactcaatcccaaacccaaaaccgttaaaatgtatccggccaattgatagtagataatgaggtgtacagcgcatgataatttacacagtaaccaaaatgaaaatactttagtaattataagaaatatagacggtaatgtcatcatcaacaatccgataatatgcctgagagtaaacattgacggataaaacaaaaatgctccgcataactctatcatggcaataacacaaccaaatacttgtaagattcctaaattagtagaaaatacaacgaatatcgatgtataagtgatctcgagaaataataagaataaagtaatgcccgtaaagataaacatcaacattgtttggtaatcattaaaccaattagtatgaagttgaactaatttcacagtagattttattccagtgttatcctcgcatgtataagtacctggtaagatatctttatattccataatcaatgagacatcactatctgataacgaatgaagtctagcactagtatgccatttacttaatattgtcgtcttggaagttttattataagttaaaatatcatggttatccaatttccatctaatatactttgtcggattatctatagtacacggaataatgatggtatcattacatgctgtatactctatggtctttgtagttgttataacaaccaacgtatagaggtatatcaacgatattctaactcttgacattttttatttatttaaaatgatacctttgttatttattttattctattttgctaacggtattgaatggcataagtttgaaacgagtgaagaaataatttctacttacttattagacgacgtattatacacgggtgttaatggggcggtatacacattttcaaataataaactaaacaaaactggtttaactaataataattatataacaacatctataaaagtagaggatgcggataaggatacattagtatgcggaaccaataacggaaatcccaaatgttggaaaatagacggttcagacgacccaaaacatagaggtagaggatacgctccttatcaaaatagcaaagtaacgataatcagtcacaacggatgtgtactatctgacataaacatatcaaaagaaggaattaaacgatggagaagatttgacggaccatgtggttatgatttattcacggcggataacgtaattccaaaagatggtttacgaggagcattcgtcgataaagacggtacttatgacaaagtttacattcttttcactgatactatcggctcaaagagaattgtcaaaattccgtatatagcacaaatgtgcctaaacgacgaaggtggtccatcatcattgtctagtcatagatggtcgacgtttctcaaagtcgaattagaatgtgatatcgacggaagaagttatagacaaattattcattctagaactataaaaacagataatgatacgatactatatgtattcttcgatagtccttattccaagtccgcattatgtacctattctatgaataccattaaacaatctttttctacgtcaaaattggaaggatatacaaagcaattgccgtctccagctcctggtatatgtttaccagctggaaaagttgttccacataccacgtttgaagtcatagaacaatataatgtactagatgatattataaagcctttatctaaccaacctatcttcgaaggaccgtctggtgttaaatggttcgatataaaggagaaggaaaatgaacatcgggaatatagaatatacttcataaaagaaaattctatatattcgttcgatacaaaatctaaacaaactcgtagctcgcaagtcgatgcgcgactattttcagtaatggtaactgcgaaaccgttatttatagcagatatagggataggagtaggaatgccacaaatgaaaaaaatacttaaaatgtaatcttaatcgagtacaccacacgacaatgaacaaacataagacagattatgctggttatgcttgctgcgtaatatgcggtctaattgtcggaattatttttacagcgacactattaaaagttgtagaacgtaaattagttcatacaccattaatagataaaacgataaaagatgcatatattagagaagattgtcctactgactggataagctataataataaatgtatccatttatctactgatcgaaaaacctgggaggaaggacgtaatgcatgcaaagctctaaattcaaattcggatctaattaagatagagactccaaacgagttaagttttttaagaagccttagacgaggctattgggtaggagaatccgaaatattaaaccagacaaccccatataattttatagctaagaatgccacgaagaatggaactaaaaaacggaaatatatttgtagcacaacgaatactcccaaactgcattcgtgttacactatataacaattacactacatttttatcataccactacttcggttagatgttttagaaaaaaataaatatcgccgtaccgttcttgtttttataaaaataacaattaacaattatcaaattttttctttaatattttacgtggttgaccattcttggtggtaaaataatctcttagtgttggaatggaatgctgtttaatgtttccacactcatcgtatattttgacgtatgtagtcacatcgtttacgcaatagtcagactgtagttctatcatgcttcctacatcagaaggaggaacagttttaaagtctcttggttttaatctattaccgttagttttcatgaaatcctttgttttatccacttcacattttaaataaatgtccactatacattcttttgttaattttactagatcgtcatgggtcatagaatttataggttccgtagtccatggatccaaactagcaaacttcgcgtatacggtatcgcgattagtgtatacaccaactgtatgaaaattaagaaaacagtttaataaatcaacagaaatatttaatcctccgtttgatacagatgcgccatatttatggatttcggattcacacgttgtttgtctgaggtgttcgtctagtgttgcttctacgtaaacttcgattcccatatattctttattgtcagaatcgcataccgatttatcatcatacactgtttgaaaactaaatggtatacacatcaaaataataaataataacgagtacattctgcaatattgttatcgtaattggaaaaatagtgttcgagtgagttggattatgtgagtattggattgtatattttattttatattttgtaataagaataaaatgctaatgtcaagtttattccaatagatgtcttattaaaaacatatataataaataacaatggctgaatggcataaaattatcgaggatatctcaaaaaataataagttcgaggatgccgccatcgttgattacaagactacaaagaatgttctagctgctattcctaacagaacatttgccaagattaatccgggtgaaattattcctctcatcactaatcgtaatattctaaaacctcttattggtcagaaatattgtattgtatatactaactctctaatggatgagaacacgtatgctatggagttgcttactgggtacgcccctgtatctccgatcgttatagcgagaactcataccgcacttatatttttgatgggtaagccaacaacatccagacgtgacgtgtatagaacgtgtagagatcacgctacccgtgtacgtgcaactggtaattaaaataaaaagtaatattcatatgtagtgtcaattttaaatgatgatgatgaaatggataatatccatattgacgatgtcaataatgccggtattggcatacagttcatcgatttttagatttcattcagaggatgtggaattatgttatgggcatttgtattttgataggatctataatgtagtaaatataaaatataatccgcatattccatatagatataattttattaatcgcacgttaaccgtagatgaactagacgataatgtcttttttacacatggttattttttaaaacacaaatatggttcacttaatcctagtttgattgtctcattatcaggaaacttaaaatataatgatatacaatgctcagtaaatgtatcgtgtctcattaaaaatttggcaacgagtacatctactatattaacatctaaacataagacttattctctacatcggtccacgtgtattactataataggatacgattctattatatggtataaagatataaatgacaagtataatgacatctatgattttactgcaatatgtatgctaatagcgtctacattgatagtgaccatatacgtgtttaaaaaaataaaaatgaactcttaattatgctatgctattagaaatggataaaatcaaaattacggttgattcaaaaattggtaatgttgttaccatatcgtataacttggaaaagataactattgatgtcacacctaaaaagaaaaaagaaaaggatgtattattagcgcaatcagttgctgtcgaagaggcaaaagatgtcaaggtagaagaaaaaaatattatcgatattgaagatgacgatgatatggatgtagaaagcgcgtaatacgatctataaaaataagtatataaatactttttatttactgtactcttactgtgtagtggtgataccctactcgattatttttttaaaaaaaaaatacttattctgattcttctagccatttccgtgttcgtttgaatgccacatcgacgtcaaagataggggagtagttgaaatctagttctgcattgttggtacgcacctcaaatgtagtgttggatatcttcaacgtatagttgttgagtagtgatggttttctaaatagaattctcttcatatcattcttgcacgcgtacatttttagcatccatcttggaatcctagatccttgttctattcccaatggtttcatcaatagaagattaaacatatcgtacgaacacgatggagagtaatcgtagcaaaagtaagcatttcctttaatcttagatcccggatactggatatattttgcagccaacacgtgcatccatgcagcatttcctacatatacccggctatgcaccgcgtcatcatcgactgtacgatacataatgttaccgtgttgcttacattgctcgtaaaagactttcatcaatttgtctccttctccgtaaattccagtgggtcttaggcaacaagtatacaattttgctccattcatgattacggaattattggctttcataaccagttgctcggccatacgtttactttttgcgtatacatgtcctggtgatatatcataaagggtatgctcatggccgatgaatggatcaccgtgtttattgggtcctattgcttccatgctactagtatagatcaaatacttgattcctaggtccacacaagctgccaaaatagtctgtgttccataatagtttactttcatgatttcattatcggtgtattttccaaatacatccactagagcagccgtatgaataatcagatttaccccatctagcgcttctctcaccttatcaaagtcgtttatatcacattgtatatagtttataaccttaactttcgaggttattggttgtggatcttctacaatatctatgactctgatttcttgaacatcatctgcactaattaacagttttactatatacctgcctagaaatccggcaccaccagtaaccgcgtacacggccattgctgccactcataatatcagactacttattctattttactaaataatggctgtttgtataatagaccacgataatatcagaggagttatttactttgaaccagtccatggaaaagataaagttttaggatcagttattggattaaaatccggaacgtatagtttgataattcatcgttacggagatattagtcaaggatgtgattccataggcagtccagaaatatttatcggtaacatctttgtaaacagatatggtgtagcatatgtttatttagatacagatgtaaatatatttacaattattggaaaggcgttatctatttcaaaaaatgatcagagattagcgtgtggagttattggtatttcttacataaatgaaaagataatacattttcttacaattaacgagaatggcgtttgatatatcagttaatgcgtctaaaacaataaatgcattagtttacttttctactcagcaaaataaattagtcatacgtaatgaagttaatgatacacactacactgtcgaatttgatagggacaaagtagttgacacgtttatttcatataatagacataatgacaccatagagataagaggggtgcttccagaggaaactaatattggttgcgcggttagtatgacttacttgtataataagtatagttttaaactgattttagcagaatatataagacacagaaatactatatccggcaatatttattcggcattgatgacactagatgatttggctattaaacagtatggagacattgatctattatttaatgagaaacttaaagtagactccgattcgggactatttgactttgtcaactttgtaaaggatatgatatgttgtgattctagaatagtagtagctctatctagtctagtatctaaacattgggaattgacaaataaaaaatataggtgtatggcattagccgaacatatatctgatagtattccaatatctgagctatctagactacgatacaatctatgtaagtatctacgcggacacactgagagcatagaggataaatttgattattttgaagacgatgattcgtctacatgttctgccgtaaccgacagggaaacggatgtataattttttttatagcgtgaaggatatgataaaaaatataattgttgtatttatcccattccaatcaccttatatgattctgtaacacaataaaggagtcttatagatgtatagaggtcagatactggtttgataaactgtttattccacataagtatgtttgactttatggttagacccgcatactttaacaaatcactgaaaattggagttaggtattgacctctcagaatcagttgccgttctggaacattaaatgtattttttatgatatactccaacgcatttatgtgggcatacaacaagtcattactaatggaatattccaagagttttagttgtctagtatttaacaagagaagagatttcaacagactgtttatgaactcgaatgccgcctcattgtcgcttatattgatgatgtcgaattctcccaatatcatcaccgatgagtagctcatcttgttatcgggatccaagttttctaaagatgtcattaaaccctcgatcatgaatggatttatcatcatcgtttttatgttggacatgagcttagtccgtttgtccacatctatagaagatgatttctgaattatttcatatatctctctctttaactccaggaacttgtcaggatggtctactttaatatgttctcgtctaagagatgaaaatctttggatggttgcacgcgacttttctctaaaggatgacgttgcccaagatcctctcttaaatgaatccatcttatccttggacaagatggacagtctattttccttagatggtttaatatttttgttacccatgatctataaaggtagacctaatcgtctcggatgaccatatatttattttcagttttattatacgcataaattgtaaaaaatatgttaggtttacgaaaatgtctcgtggggcattaatcgtttttgaaggattggacaaatctggaaaaacaacacaatgtatgaacatcatggaatcaataccttcaaacacaataaaataccttaactttcctcagagatccactgtcactggaaagatgatagatgactatctaactcgtaaaaaaacctataatgatcatatagttaatctattattttgtgcaaatagatgggagtttgcatcttttatacaagaacaactagaacagggaattactttaatagttgatagatacgcattttctggagtagcgtatgccgccgctaaaggcgcgtcaatgactctcagtaagagttatgaatctggattgcctaaacccgacttagttatattcttggaatctggtagcaaagaaattaatagaaacgtcggtgaggaaatttatgaagatgttacattccaacaaaaggtattacaagaatataaaaaaatgattgaagaaggagatattcattggcaaattatttcttctgaattcgaggaagatgtaaagaaggagttgattaagaatatagttatagaggctatacacacggttactggaccagtggggcaactgtggatgtaatagtgaaattacattttttataaatagatgttagtacagtgttataaatggatgaagcatattactctggcaacttggaatcagtactcggatacgtgtccgatatgcataccgaactcgcatcaatatctcaattagttattgccaagatagaaactatagataatgatatattaaacaaggacattgtaaattttatcatgtgtagatcaaacttggataatccatttatctctttcctagatactgtatatactattatagatcaagagaactatcagactgagttgattaattcattagacgacaatgaaattatcgattgtatagttaataagtttatgagcttttataaggataacctagaaaatatagtagatgctatcattactctaaaatatataatgaataatccagattttaaaactacgtatgccgaagtactcggttccagaatagccgatatagatattaaacaagtgatacgtaagaatatactacaattgtctaataatatccgcgaacgatatttgtgaaaatattaaaaaaaaatactttttttattaaatgacgtcttttcgtgaatttagaaaattatgctgtgctatatatcacgcatcaggatataaagaaaaatctaaattaattagagactttataacagatagggatgataaatatttgatcattaagctattgcttcccggattagacgatagaatttataacatgaacgataaacaaattataaaattatatagtataatatttaaacaatctcaggaagatatgctacaagatttaggatacggatatataggagacactattaggactttcttcaaagagaacacagaaatccgtccacgagataaaagcattttaactttagaagaagtggatagttttttaactacgttatcatccgtaactaaagaatcgcatcaaataaaattattgactgatgtagcatctgtttgtacatgtaatgatttaaaatgtgtagtcatgcttattgataaagatctaaaaattaaagcgggtcctcggtacgtacttaacgctattagtcctaatgcctatgatgtgtttagaaaatctaataacttgaaagagataatagaaaattcatctaaacaaaatctagactctatatctatttctgttatgactccaattaatcccatgttagcggaatcgtgtgattctgtcaataaggcgtttaaaaaatttccatcaggaatgtttgcggaagtcaaatacgatggtgaaagagtacaagttcataaaaataataacgagtttgccttctttagtagaaacatgaaaccagtactctctcataaagtggattatctcaaagaatacataccgaaagcatttaaaaaagctacgtctatcgtattggattctgaaattgttcttgtagacgaacataatgtaccgctcccgtttggaagtttaggtatacacaaaaagaaagaatataaaaactctaacatgtgtttgttcgtgtttgactgtttgtactttgatggattcgatatgacggacattccattgtacgaacgaagatcttttctcaaagatgttatggttgaaatacccaatagaatagtattctcagagttgacgaatattagtaacgagtctcagttaactgacgtattggatgatgcactaacgagaaaattagaaggattggtcttaaaagatattaatggagtatacgaaccgggaaagagaagatggttaaaaataaagcgagactatttgaacgagggttccatggcagattctgccgatttagtagtactaggtgcctactatggtaaaggagcaaagggtggtatcatggcagtctttctaatgggttgttacgacgatgaatccggtaaatggaagacggttaccaagtgttcaggacacgatgataatacgttaagggagttgcaagaccaattaaagatgattaaaattaacaaggatcccaaaaaaattccagagtggttagtagttaataaaatctatattcccgattttgtagtagaggatccgaaacaatctcagatatgggaaatttcaggagcagagtttacatcttccaagtcccataccgcaaatggaatatccattagatttcctagatttactaggataagagaggataaaacgtggaaagaatctactcatctaaacgatttagtaaacttgactaaatcttaatagttacatacaaactgaaaattaaaataacactatttagttggtggtcgccatggatggtgttattgtatactgtctaaacgcgctagtaaaacatggcgaggaaataaatcatataaaaaatgatttcatgattaaaccatgttgtgaaagagtttgtgaaaaagtcaagaacgttcacattggcggacaatctaaaaacaatacagtgattgcagatttgccatatatggataatgcggtatccgatgtatgcaattcactgtataaaaagaatgtatcaagaatatccagatttgctaatttgataaagatagatgacgatgacaagactcctactggtgtatataattattttaaacctaaagatgccattcctgttatcatatctataggaaaggataaagatgtctgtgaactattaatctcatcagacatatcgtgtgcatgcgtggagttaaattcatatcacgtagccattcttcccatggatgtttccttttttaccaaaggaaatgcatcattgattattctcctgtttgatttctctatcgatgcggcacctctcttaagaagtgtaaccgataataatgttattatatctagacaccagcgtctacatgacgagcttccgagttccaattggttcaagttttacataagtataaagtccgactattgttctatattatatatggttgttgatggatctgtgatgcatgcgatagctgataatagaactcacgcaattattagcaaaaatatattagacaatactacgattaacgatgagtgtagatgctgttattttgaaccacagattaggattcttgatagagatgagatgctcaatggatcatcgtgtgatatgaacagacattgtattatgatgaatttacctgatgtaggcgaatttggatctagtatgttggggaaatatgaacctgacatgattaagattgctctttcggtggctggtaatttaataagaaatcgagactacattcccgggagacgaggatatagctactacgtttacggtatagcctctagataatttttttaagcacgaaataaaaaacataattttaaaccaatctatttcatactattttgtgtgatcaccatggacataaagatagatattagtatttctggtgataaatttacggtgactactaggagggaaaatgaagaaagaaaaaaatatctacctctccaaaaagaaaaaactactgatgttatcaaacctgattatcttgagtacgatgacttgttagatagagatgagatgtttactattctagaggaatattttatgtacagaggtctattaggcctcagaataaaatatggacgactctttaacgaaattaaaaaattcgacaatgatgcggaagaacaattcggtactatagaagaactcaagcagaaacttagattaaattctgaagagggagcagataactttatagattatataaaggtacaaaaacaggatatcgtcaaacttactgtatacgattgcatatctatgataggattgtgtgcatgcgtggtagatgtttggagaaatgagaaactgttttctagatggaaatattgtttacgagcgattaaactgtttattgatgatcacatgcttgataagataaaatctatactgcagaatagactagtatatgtggaaatgtcatagaaagttaaaagttaatgagagcaaaaatatataaggttgtattccatatttgttatttttttctgtaatagttagaaaaatacattcgatggtctatctatcagattattatgtgttataaggtactttttctcataataaactagagtatgagtaagatagtgtttttcaaaacatataaatctaaaattgatggatgagatatacagctattaatttcgaaaatatattttaatctgataactttaaacatggatttttaatggtggtttaacgttttaaaaaaagattttgttattgtagtatatgataatattaaaagatggatataaagaatttgctgactgcatgtactattttttacattactacattggctacggcagatatacctacttcgtcactgccacacgctccggtaaacggggcatgtgacgagggagaatatcttgataagaggcataatcaatgttgtaatcagtgtccacctggagaatttgccaaggttagatgtaatggtaacgataacacaaaatgtgaacgctgcccacctcatacatataccgcaatccccaattactctaatggatgtcatcaatgtagaaaatgcccaacaggatcatttgataaggtaaagtgtaccggaacacagaacagtaaatgttcgtgtcttcctggttggtattgcgctactgattcttcacagactgaagattgtcgagattgtataccaaaaaggagatgtccatgcggatactttggtggaatagatgaacaaggaaatcctatttgtaaatcgtgttgtgttggtgaatattgcgactacctacgtaattatagacttgatccatttcctccatgcaaactatctaaatgtaattaattatgattttgatgataatgttaccatacattatatcgctacttggttagtgtattattcagtatgaagacctattaataattacttatcttttgacgatcttgttataattataatataaaaatacttatggcatagtaactcataattgctgacgcgataaattcgtaataatctgttttgttcaaatttttataaggaatctacaggcataaaaataaaaatataatttataatatactcttacagcgcgccatcatgaataacagcagtgaattgattgctgttattaatggatttagaaatagtggacgattttgtgatattaatatagttattaatgatgaaaggataaacgctcacagactcatcctatctggagcctccgaatatttttccattctgttttccaataattttatcgattctaatgaatacgaagttaatctaagtcatttagattatcaaagtgttaacgatttgatcgattacatttatgggatacctttgagcctaactaacgataacgtgaaatatattctttcaaccgctgattttttacaaattggatctgctattacggagtgtgaaaattacatacttaaaaatctttgttctagaaactgtatcgatttctacatatacgctgataaatataataacaagaaaatagaatcagcgtcgtttaacacaatattacaaaatattttgagactcatcaacgatgaaaactttaaatacttaacagaggaatcaatgataaaaattttaagcgatgatatgttaaatataaaaaatgaggatttcgccccactaattctcattaaatggttagagagtactcaacaaccatgcaccgtcgagttacttaaatgcctcagaatatcattgctttccccacaagttataaaatcactttatagtcatcgactggttagttcaatctacgaatgtataacattcttaaacaatatagcattcttggatgaatcatttcctagataccatagcatcgagttgatatctatcggtataagtaattcgcatgataagatttccataaactgctacaatcataaaaaaaatacatgggaaatgatatcttcacgtagatataggtgtagtttcgcagtggccgtcctggataatattatctatatgatgggtggatatgatcagtccccgtatagaagttcaaaggttatagcgtacaatacatgtacaaattcttggatatatgatataccagagctaaaatatcctcgttctaattgtgggggactggctgatgacgaatacatttattgtataggcggcatacgcgatcaggattcatcgttgacatctagtattgatagatggaagccatcaaaaccatattggcagaagtatgctaaaatgcgcgaaccaaaatgtgatatgggggttgcgatgttaaacggattaatatatgttataggtggaatcgttaaaggtgacacgtgtaccgacgcactagagagtttatcagaagatggatggatgaagcatcaacgtcttccaataaaaatgtccaatatgtcgacgattgttcatgatggcaagatttatatatctggaggttacaacaatagtagtgtagttaatgtaatatcgaatctagtccttagctataattcgatatatgatgaatggaccaaattatcatcattaaacattcctagaattaatcccgctctatggtcagcgcataataaattatatgtaggaggaggaatatctgatgatgttcgaactaatacatctgagacatacgacaaagaaaaagattgttggacattggataatggtcacgtgttaccacgcaattatataatgtataaatgcgaaccgattaaacataaatatccattggaaaaaacacagtacacgaatgattttctaaagtatttggaaagttttataggtagttgatagaacaaaatacataattttgtaaaaataaatcactttttatactaatatgacacgattaccaatacttttgttactaatatcattagtatacgctacaccttttcctcagacatctaaaaaaataggtgatgatgcaactctatcatgtaatcgaaataatacaaatgactacgttgttatgagtgcttggtataaggagcccaattccattattcttttagctgctaaaagcgacgtcttgtattttgataattataccaaggataaaatatcttacgactctccatacgatgatctagttacaactatcacaattaaatcattgactgctagagatgccggtacttatgtatgtgcattctttatgacatcaactacaaatgacactgataaagtagattatgaagaatactccacagagttgattgtaaatacagatagtgaatcgactatagacataatactatctggatctacacattcaccggaaactagttctaagaaacctgattatatagataattctaattgctcgtcggtattcgaaatcggtacccggggatcagcttgcatgcctgcagcaattcccgaggctgtagccgacgatggtgcgccaggagagttgttgattcattgtttgcctccctgctgcggtttttcaccgaagttcatgccagtccagcgtttttgcagcagaaaagccgccgacttcggtttgcggtcgcgagtgaagatccctttcttgttaccgccaacgcgcaatatgccttgcgaggtcgcaaaatcggcgaaattccatacctgttcaccgacgacggcgctgacgcgatcaaagacgcggtgatacatatccagccatgcacactgatactcttcactccacatgtcggtgtacattgagtgcagcccggctaacgtatccacgccgtattcggtgatgataatcggctgatgcagtttctcctgccaggccagaagttctttttccagtaccttctctgccgtttccaaatcgccgctttggacataccatccgtaataacggttcaggcacagcacatcaaagagatcgctgatggtatcggtgtgagcgtcgcagaacattacattgacgcaggtgatcggacgcgtcgggtcgagtttacgcgttgcttccgccagtggcgcgaaatattcccgtgcaccttgcggacgggtatccggttcgttggcaatactccacatcaccacgcttgggtggtttttgtcacgcgctatcagctctttaatcgcctgtaagtgcgcttgctgagtttccccgttgactgcctcttcgctgtacagttctttcggcttgttgcccgcttcgaaaccaatgcctaaagagaggttaaagccgacagcagcagtttcatcaatcaccacgatgccatgttcatctgcccagtcgagcatctcttcagcgtaagggtaatgcgaggtacggtaggagttggccccaatccagtccattaatgcgtggtcgtgcaccatcagcacgttatcgaatcctttgccacgcaagtccgcatcttcatgacgaccaaagccagtaaagtagaacggtttgtggttaatcaggaactgttcgcccttcactgccactgaccggatgccgacgcgaagcgggtagatatcacactctgtctggcttttggctgtgacgcacagttcatagagataaccttcacccggttgccagaggtgcggattcaccacttgcaaagtcccgctagtgccttgtccagttgcaaccacctgttgatccgcatcacgcagttcaacgctgacatcaccattggccaccacctgccagtcaacagacgcgtggttacagtcttgcgcgacatgcgtcaccacggtgatatcgtccacccaggtgttcggcgtggtgtagagcattacgctgcgatggattccggcatagttaaagaaatcatggaagtaagactgctttttcttgccgttttcgtcggtaatcaccattcccggcgggatagtctgccagttcagttcgttgttcacacaaacggtgatacgtacacttttcccggcaataacatacggcgtgacatcggcttcaaatggcgtatagccgccctgatgctccatcacttcctgattattgacccacactttgccgtaatgagtgaccgcatcgaaacgcagcacgatacgctggcctgcccaacctttcggtataaagacttcgcgctgataccagacgttgcccgcataattacgaatatctgcatcggcgaactgatcgttaaaactgcctggcacagcaattgcccggctttcttgtaacgcgctttcccaccaacgctgatcaattccacagttttcgcgatccagactgaatgcccacaggccgtcgagttttttgatttcacgggttggggtttctacaggacgtaacattctagtcgaggaattcatttatagcatagaaaaaaacaaaatgaaattctactatatttttacatacatatattctaaatatgaaagtggtgattgtgactagcgtagcatcgcttctagacatctatatactatatagtaataccaatactcaagactacgaaactgatacaatctcttatcatgtgggtaatgttctcgatgtcgatagccatatgcccggtagttgcgatatacataaactgatcactaattccaaacccacccgctttttatagtaagtttttcacccataaataataaatacaataattaatttctcgtaaaagtagaaaatatattctaatttattgcacggtaaggaagtagaatcataaagaacagtgacggatccccgatccccgacctgcaggcatgcaagctcgactccggaaccaattactgataatgtagaagatcatacagacaccgtcacatacactagtgatagcattaatacagtaagtgcatcatctggagaatccacaacagacgagactccggaaccaattactgataaagaagatcatacagttacagacactgtctcatacactacagtaagtacatcatctggaattgtcactactaaatcaaccaccgatgatgcggatctttatgatacgtacaatgataatgatacagtaccaccaactactgtaggcggtagtacaacctctattagcaattataaaaccaaggactttgtagaaatatttggtattaccgcattaattatattgtcggccgtggcaattttctgtattacatattatatatataataaacgttcacgtaaatacaaaacagagaacaaagtctagatttttgacttacataaatgtctgggatagtaaaatctatcatattgagcggaccatctggtttaggaaagacagccatagccaaaagactatgggaatatatttggatttgtggtgtcccataccactagatttcctcgtcctatggaacgagaaggtgttgattaccattacgttaacagagaggccatctggaagggaatagccgccggaaactttctagaacatactgagtttttaggaaatatttacggaacttctaaaacagctgtgaatacagcggctattaataatcgtatttgtgtgatggatctaaacatcgacggtgttagaagtcttaaaaatacgtacctaatgccttactcggtgtatataagacctacctctcttaaaatggttgagaccaagcttcgtcgtagaaacactgaagctaacgatgagattcatcgtcgtgtgatgttggcaaaaactgacatggatgaggcaggtgaagccggtctattcgacactattatcattgaagatgatgtgaatttagcatatagtaagttaattcagatactacaggaccgtattagaatgtattttaacactaattagagacttaagacttaaaacttgataattaataatataactcgtttttatatgtgtctatttcaacgtctaatgtattagttaaatattaaaacttaccacgtaaaacttaaaatttaaaatgatatttcattgacagatagatcacacattatgaactttcaaggacttgtgttaactgacaattgcaaaaatcaatgggtcgttggaccattaataggaaaaggtggattcggtagtatttatactactaatgacaataattatgtagtaaaaatagagcccaaagctaacggatcattatttaccgaacaggcattttatactagagtacttaaaccatccgttatcgaagaatggaaaaaatctcacaatataaagcacgtaggtcttatcacgtgcaaggcatttggtctatacaaatccattaatgtggaatatcgattcttggtaattaatagattaggtgcagatctagatgcggtgatcagagccaataataatagactaccaaaaaggtcggtgatgttgatcggaatcgaaatcttaaataccatacaatttatgcacgagcaaggatattctcacggagatattaaagcgagtaatatagtcttagatcaaatagataagaataaattatatctagtggattacggattggtttctaaattcatgtctaatggcgaacatgttccatttataagaaatccaaataaaatggataacggtactctagaatttacacctatagattcgcataaaggatacgttgtatctagacgtggagatctagaaacacttggatattgtatgattagatggttgggaggtatcttaccatggactaagatatctgaaacaaagaattgtgcattagtaagtgccacaaaacagaaatatgttaacaatactgcgactttgttaatgaccagtttgcaatatgcacctagagaattgctgcaatatattaccatggtaaactctttgacatattttgaggaacccaattacgacaagtttcggcacatattaatgcagggtgtatattattaagtgtggtgtttggtcgataaaaattaaaaaataacttaatttattattgatctcgtgtgtacaaccgaaatcatggcgatgttttacgcacacgctctcggtgggtacgacgagaatcttcatgcctttcctggaatatcatcgactgttgccaatgatgtcaggaaatattctgttgtgtcagtttataataacaagtatgacattgtaaaagacaaatatatgtggtgttacagtcaggtgaacaagagatatattggagcactgctgcctatgtttgagtgcaatgaatatctacaaattggaaatccgatccatgatcaagaaggaaatcaaatctctatcatcacatatcgccacaaaaactactatgctctaagcggaatcgggtacgagagtctagacttgtgtttggaaggagtagggattcatcatcacgtacttgaaacaggaaacgctgtatatggaaaagttcaacatgattattctactatcaaagagaaggccaaagaaatgagtgcacttagtccaggacctatcatcgattaccacgtctggataggagattgtatctgtcaagttactgctgtggacgtacatggaaaggaaattatgaaaatgagattcaaaaagggtgcggtgcttccgatcccaaatctggtaaaagttaaacttggggagaatgatacagaaaatctttcttctactatatcggcggcaccatcgaggtaaccacctctctggaagacagcgtgaatcatgtactcatgaaacgtttggaaactatacgccatatgtggtctgttgtatatgatcattttgatattgtgaatggtaaagaatgctgttatgtgcatacgcattcatctaatcaaaatcctataccgagtactgtaaaaacaaatttgtacatgaagactatgggatcatgcattcaaatggattccatggaagctctagagtatcttagcgaactgaaggaatcaggtggatggagtcccagaccagaaatgcaggaatttgaatatccagatggagtggaagacactgaatcaattgagagattggcagaggagttcttcaatagatcagaacttcaggctggtgaatcagtcaaatttggtaattctattaattgttaaacatacatctgtttcagctaagcaactaagaacacgtatacggcagcagcttccttctatactctcatcttttaccaacacaaagggtggatatttgttcattggagttgataataatacacacaaagtatttggattcacggtgggttacgactacctcagactgatagagaatgatatagaaaagcatatcaaaagacttcgtgttgtgcatttctgtgagaagaaagaggacatcaagtacgcgtgtcgattcatcaaggtatataaacctggggatgagactacctcgacatacgtgtgcgctatcaaagtggaaagatgctgttgtgctgtgtttgcagattggccagaatcatggtatatggatactaatggtatcaagaagtattctccagatgaatgggtgtcacatataaaattttaattaatgtaactatagagaacaaataataaggttgtaatatcatatagacaataactaacaattaattagtaactgttatctcttttttaactaaccaactaactatatacctattaatacatcgtaattatagttcttaacatctattaatcattaattcgcttctttaattttttataaactaacattgttaattgaaaagggataacatgttacagaatataaattatatatggatttttttaaaaaggaaatacttgactggagtatatatttatctcttcattatatagcacgcgtgttttccaatttttccacatcccatataatacaggattataatctcgttcgaacatacgagaaagtggataaaacaatagttgattttttatctaggttgccaaatttattccatattttagaatatggggaaaatattctacatatttattctatggatgatgctaatacgaatattataattttttttctagatagagtattaaatattaataagaacgggtcatttatacacaatctcgggttatcatcatccattaatataaaagaatatgtatatcaattagttaataatgatcatccagataataggataagactaatgcttgaaaatggacgtagaacaagacattttttgtcctatatatcagatacagttaatatctatatatgtattttaataaatcatggattttatatagatgccgaagacagttacggttgtacattattacatagatgtatatatcactataagaaatcagaatcagaatcatacaatgaattaattaagatattgttaaataatggatcagatgtagataaaaaagatacgtacggaaacacaccttttatcctattatgtaaacacgatatcaacaacgtggaattgtttgagatatgtttagagaatgctaatatagactctgtagactttaatagatatacacctcttcattatgtctcatgtcgtaataaatatgattttgtaaagttattaatttctaaaggagcaaatgttaatgcgcgtaataaattcggaactactccattttattgtggaattatacacggtatctcgcttataaaactatatttggaatcagacacagagttagaaatagataatgaacatatagttcgtcatttaataatttttgatgctgttgaatctttagattatctattatccagaggagttattgatattaactatcgtactatatacaacgaaacatctatttacgacgctgtcagttataatgcgtataatacgttggtctatctattaaacaaaaatggtgattttgagacgattactactagtggatgtacatgtatttcggaagcagtcgcaaacaacaacaaaataataatggaagtactattgtctaaacgaccatctttgaaaattatgatacagtctatgatagcaattactaaacataaacagcataatgcagatttattgaaaatgtgtataaaatatactgcgtgtatgaccgattatgatactcttatagatgtacagtcgctacagcaatataaatggtatattttaagatgtttcgatgaaatagatatcatgaagagatgttatataaaaaataaaactgtattccaattagttttttgtatcaaagacattaatactttaatgagatacggtaaacatccttctttcgtgaaatgcactagtctcgacgtatacggaagtcgtgtacgtaatatcatagcatctattagatatcgtcagagattaattagtctattatccaagaagctggatcctggagataaatggtcgtgttttcctaacgaaataaaatataaaatattggaaaactttaacgataacgaactatccacatatctaaaaatcttataaacattattaaaatataaaatctaagtaggataaaatcacactacatcattgtttccttttagtgctcgacagtgtatactatttttaacgctcataaataaaaatgaaaacgatttccgttgttacgttgttatgcgtactacctgctgttgtttattcaacatgtactgtacccactatgaataacgctaaattaacgtctaccgaaacatcgtttaatgataaccagaaagttacgtttacatgtgatcagggatatcattctttggatccaaatgctgtctgtgaaacagataaatggaaatacgaaaatccatgcaaaaaaatgtgcacagtttctgattatgtctctgaactatataataaaccgctatacgaagtgaattccaccatgacactaagttgcaacggcgaaacaaaatattttcgttgcgaagaaaaaaatggaaatacttcttggaatgatactgttacgtgtcctaatgcggaatgtcaacctcttcaattagaacacggatcgtgtcaaccagttaaagaaaaatactcatttggggaatatatgactatcaactgtgatgttggatatgaggttattggtgcttcgtacataagttgtacagctaattcttggaatgttattccatcatgtcaacaaaaatgtgatatgccgtctctatctaacggattaatttccggatctacattttctatcggtggcgttatacatcttagttgtaaaagtggttttacactaacggggtctccatcatccacatgtatcgacggtaaatggaatcccatactcccaatatgtgtacgaactaacgaaaaatttgatccagtggatgatggtcccgacgatgagacagatttgagcaaactctcgaaagacgttgtacaatatgaacaagaaatagaatcgttagaagcaacttatcatataatcatagtggcgttgacaattatgggcgtcatatttttaatctccgttatagtattagtttgttcctgtgacaaaaataatgaccaatataagttccataaattgctaccgtaaatataaatccgttaaaataattaataatttaataacaaacaagtatcaaaagattaaagacttatagctagaatcaattgagatgtcttcttcagtggatgttgatatctacgatgccgttagagcatttttactcaggcactattataacaagagatttattgtgtatggaagaagtaacgccatattacataatatatacaggctatttacaagatgcgccgttataccgttcgatgatatagtacgtactatgccaaatgaatcacgtgttaaacaatgggtgatggatacacttaatggtataatgatgaatgaacgcgatgtttctgtaagcgttggcaccggaatactattcatggaaatgtttttcgattacaataaaaatagtatcaacaatcaactaatgtatgatataattaatagcgtatctataattctagctaatgagagatatagaagcgcttttaacgacgatggtatatacatccgtagaaatatgattaacaagttgtacggatacgcatctctaactactattggcacgatcgctggaggtgtttgttattatctgttgatgcatctagttagtttgtataaataattatttcaatatactagttaaaattttaagattttaaatgtataaaaaactaataacgtttttatttgtaataggtgcattagcatcctattcgaataatgagtacactccgtttaataaactgagtgtaaaactctatatagatggagtagataatatagaaaattcatatactgatgataataatgaattggtgttaaattttaaagagtacacaatttctattattacagagtcatgcgacgtcggatttgattccatagatatagatgttataaacgactataaaattattgatatgtataccattgactcgtctactattcaacgcagaggtcacacgtgtagaatatctaccaaattatcatgccattatgataagtacccttatattcacaaatatgatggtgatgagcgacaatattctattactgcagagggaaaatgctataaaggaataaaatatgaaataagtatgatcaacgatgatactctattgagaaaacatactcttaaaattggatctacttatatatttgatcgtcatggacatagtaatacatattattcaaaatatgatttttaaaaatttaaaatatattatcacttcagtgacagtagtcaaataacaaacaacaccatgagatatattataattctcgcagttttgttcattaatagtatacatgctaaaataactagttataagtttgaatccgtcaattttgattccaaaattgaatggactggggatggtctatacaatatatcccttaaaaattatggcatcaagacgtggcaaacaatgtatacaaatgtaccagaaggaacatacgacatatccgcatttccaaagaatgatttcgtatctttctgggttaaatttgaacaaggcgattataaagtggaagagtattgtacgggactatgcgtcgaagtaaaaattggaccaccgactgtaacattgactgaatacgacgaccatatcaatttgtacatcgagcatccgtatgctactagaggtagcaaaaagattcctatttacaaacgcggtgacatgtgtgatatctacttgttgtatacggctaacttcacattcggagattctaaagaaccagtaccatatgatatcgatgactacgattgcacgtctacaggttgcagcatagactttgtcacaacagaaaaagtgtgcgtgacagcacagggagccacagaagggtttctcgaaaaaattactccatggagttcgaaagtatgtctgacacctaaaaagagtgtatatacatgcgcaattagatccaaagaagatgttcccaatttcaaggacaaaatggccagagttatcaagagaaaatttaatacacagtctcaatcttatttaactaaatttctcggtagcacatcaaatgatgttaccacttttcttagcatgcttaacttgactaaatattcataactaatttttattaatgatacaaaaacgaaataaaactgcatattatacactggttaacgcccttataggctctaaccattttcaagatgaggtccctgattatagtccttctgttcccctctatcatctactccatgtctattagacgatgtgagaagactgaagaggaaacatggggattgaaaatagggttgtgtataattgccaaagatttctatcccgaaagaactgattgcagtgttcatctcccaactgcaagtgaaggattgataactgaaggcaatggattcagggatatacgaaacaccgataaattataaaaaaagcaatgtgtccgctgtttccgttaataatactattttcgtaactggcggattattcataaataactctaatagcacgatcgtggttaacaatatggaaaaacttgacatttataaagacaaacaatggtcgattatagaaatgcctatggctagggtatatcacggcattgactcgacatttggaatgttatattttgccggaggtctatccgttaccgaacaatatggtaatttagagaaaaacaacgagatatcttgttacaatcctagaacgaataagtggtttgatatttcatatactatttataagatatccatatcatcattgtgtaaactaaataacgtcttctatgtatttagtaaggacattggatatgtggaaaagtatgatggtgcatggaagttagtacatgatcgtctccccgctataaaggcattatcaacttctccttattgattgaaaatgaaaatataaatagtttttatgtatagcagtattaccctatagttttattgcttactactaacatggatacagatgttacaaatgtagaagatatcataaatgaaatagatagagagaaagaagaaatactaaaaaatgtagaaattgaaaataataaaaacattaacaagaatcatcccaatgaatatattagagaagcactcgttattaataccagtagtaatagtgattccattgataaagaagttatagaatgtatcagtcacgatgtaggaatatagatcatatctactaatttttataatcgatacaaaacataaaaaacaactcgttattacatagcaggcatggaatccttcaagtattgttttgataacgatggcaagaaatggattatcggaaatactttatattctggtaattcaatactctataaggtcagaaaaaatttcactagttcgttctacaattacgtaatgaagatagatcacaaatcacacaagccattgttgtctgaaatacgattctatatatctgtattggatcctttgactatcgacaactggacacgggaacgtggtataaagtatttggctattccagatctgtatggaattggagaaaccgatgattatatgttcttcgttataaagaattcgggaagagtattcgccccaaaggatactgaatcagtcttcgaagcatgcgtcactatgataaacacgttagagtttatacactctcgaggatttacccatggaaaaatagaaccgaggaatatactgattagaaataaacgtctttcactaattgactattctagaactaacaaactatacaagagtggaaactcacatatagattacaacgaggacatgataacttcaggaaatatcaattatatgtgtgtagacaatcatcttggagcaacagtttcaagacgaggagatttagaaatgttgggatattgcatgatagaatggttcggtggcaaacttccatggaaaaacgaaagtagtataaaagtaataaaacaaaaaaaagaatataaaaaatttatagctactttctttgaggactgttttcctgaaggaaatgaacctctggaattagttagatatatagaattagtatacacgttagattattctcaaactcctaattatgacagactacgtaaactgtttatacaagattgaaattatattcttttttttatagagtgtggtagtgttacggatatctaatattaatattagactatctctatcgcgctacacgaccaatatcgattactatggatatcttctatgaaaggagagaatgtatttatttctccagcgtcaatctcgtcagtattgacaatactgtattatggagctaatggatccactgctgaacagctatcaaaatatgtagaaacggaggagaacacggataaggttagcgctcagaatatctcattcaaatccatgaataaagtatatgggcgatattctgccgtgtttaaagattcctttttgagaaaaattggcgataagtttcaaactgttgacttcactgattgtcgcactatagatgcaatcaacaagtgtgtagatatctttactgaggggaaaatcaatccactattggatgaaccattgtctcctagcaattagtgccgtatactttaaagcaaaatggttgacgccattcgaaaaggaatttaccagtgattatcccttttacgtatctccgacggaaatggtagacgtaagtatgatgtctatgtacggcaaggcatttaatcacgcatctgtaaaagaatcattcggcaacttttcaatcatagaactgccatatgttggagatactagtatgatggtcattcttccagacaagattgatggattagaatccatagaacaaaatctaacagatacaaattttaagaaatggtgtgactttatggatgctatgtttatagatgttcacattcccaagtttaaggtaacaggctcgtataatctggtggatactctagtaaagtcaggactgacagaggtgttcggttcaactggagattatagcaatatgtgtaatttagatgtgagtgtcgacgctatgatccacaaaacgtatatagatgtcaatgaagagtatacagaagcagctgcagcaacttctgtactagtggcagactgtgcatcaacaattacaaatgagttctgtgcagatcatccgttcatctatgtgattaggcatgttgatggaaaaattcttttcgttggtagatattgctctccgacaactaattgttaaccattttttttaaaaaaaatagaaaaaacatgtggtattagtgcaggtcgttgttcttccaattgcaattggtaagatgacggccaactttagtacccacgtcttttcaccacagcactgtggatgtgacagactgaccagtattgatgacgtcaaacaatgtttgactgaatatatttattggtcgtcctatgcataccgcaacaggcaatgcgctggacaattgtattccacactcctctcttttagagatgatgcggaattagtgttcatcgacattcgcgagctggtaaaaaatatgccgtgggatgatgtcaaagattgtacagaaatcatccgttgttatataccggatgagcaaaaaaccatcagagagatttcggccatcatcggactttgtgcatatgctgctacttactggggaggtgaagaccatcccactagtaacagtctgaacgcattgtttgtgatgcttgagatgctaaattacgtggattataacatcatattccggcgtatgaattgatgagttgtacatcttgacattttctttcttctcttctccctttcttctcttctcccttcctccctcttctccctttcccagaaacaaacttttttacccactataaaataaaatgagtatactacctattatatttcttcctatatttttttattcttcattcgttcagacttttaacgcgtctgaatgtatcgacaaagggcaatattttgcatcattcatggagttagaaaacgagccagtaatcttaccatgtcctcaaataaatacgctatcatccggatataatatattagatattttatgggaaaaacgaggagcggataatgatagaattataccgatagataatggtagcaatatgctaattctgaacccgacacaatcagactctggtatttatatatgcattaccacgaacgaaacctactgtgacatgatgtcgttaaatttgacaatcgtgtctgtctcagaatcaaatatagatcttatctcgtatccacaaatagtaaatgagagatctactggcgaaatggtatgtcccaatattaatgcatttattgctagtaacgtaaacgcagatattatatggagcggacatcgacgccttagaaataagagacttaaacaacggacacctggaattattaccatagaagatgttagaaaaaatgatgctggttattatacatgtgttttagaatatatatacggtggcaaaacatataacgtaaccagaattgtaaaattagaggtacgggatagaataataccttctactatgcaattaccagatggcattgtaacttcaataggtagtaatttgactattgcatgcagagtatcgttgagacctcccacaacggacaccgacgtcttttggataagtaatggtatgtattacgaagaagatgatggggacggaaacggtagaataagtgtagcaaataaaatctatatgaccgataagagacgtgttattacatcccggttaaacattaatcctgtcaaggaagaagatgctacaacgtttacgtgtatggcgtttactattcctagcatcagcaaaacagttactgttagtataacgtgaatgtatgttgttacatttccatgtcaattgagtttataagaatttttatacattatcttccaacaaacaattgacgaacgtattgctatgattaactcccacgatactatgcatattattaatcattaacttgcagactatacctagtgctattttgacatactcgtgttcttgtgtaattgcggtatctatattattaaagtacgtaaatctagctatagttttattatttaattttagataatataccgtctccttatttttaaaaattgccacatcctttattaaatcatgaatgggaatttctatgtcatcgttagtatattgtgaacaacaagagcagatatctataggaaagggtggaatgcgatacattgatctatgtagttttaaaacacacgcgaactttgaagaatttatataaatcattccatcgatacatccttctatgttgacatgtatatatccaggaattcttttattaatgtcaggaaatgtataaactaaaacattgcccgaaagcggtgcctctatctgcgttatatccgttcttaacttacaaaatgtaaccaatacctttgcatgacttgttttgttcggcaacgttagtttaaacttgacgaatggattaattacaatagcatgatccgcgcatctattaagtttttttactttaacgcccttgtatgtttttacagagactttatctaaatttctagtgcttgtatgtgttataaatataacgggatatagaaccgaatcacctaccttagatacccaattacattttatcagatccagataataaacaaattttgtcgccctaactaattctatattgttatatattttacaattggttatgatatcatgtaataacttggagtctaacgcgcatcgtcgtacgtttatacaattgtgatttagtgtagtatatctacacatgtatttttccgcactatagtattctggactagtgataaaactatcgttatatctgtcttcaatgaactcatcgagatattgctctctgtcatattcatacacctgcataaactttctagacatcttacaatccgtgttattttaggatcatatttacatatttacgggtatatcaaagatgttagattagttaatgggaatcgtctataataatgaatattaaacaattatatgaggacttttaccacaaagcatcataaaaatgagtcgtcgtctgatttatgttttaaatatcaaccgcaaatcaactcataaaatacaagagaatgaaatatatacatattttagtcattgcaatatagaccatacttctacagaacttgattttgtagttaaaaactatgatctaaacagacgacaacctgtaactgggtatactgcactacactgctatttgtataataattactttacaaacgatgtactgaagatattattaaatcatgacgtaaatgtaacgatgaaaaccagtagcggacgtatgcctgtttatatattgcttactagatgttgtaatatttcacatgatgtagtgatagatatgatagacaaagataaaaaccacttattacatagagactattccaacctattactagagtatataaaatctcgttacatgttattgaaggaagaggatatcgatgagaacatagtatccactttattagataagggaatcgatcctaactttaaacaagacggatatacagcgttacattattattatttgtgtctcgcacacgtttataaactaggtgagtgtagaaaaccgataacgataaaaaaggccaagcgaattatttctttgtttatacaacatggagctaatctaaacgcgttagataattgtggtaatacaccattccatttgtatcttagtattgaaatgtgtaataatattcatatgactaaaatgctgttgacttttaatccgaatttcaaaatatgtaataatcatggattaacgcctatactatgttatataacttccgactacatacaacacgatattcttgttatgttaatacatcactatgaaacaaatgttggagaaatgccgatagatgagcgtcgtatgatcgtattcgagtttatcaaaacatattctacacgtccggcagattcgataacttatttgatgaataggtttaaaaatataaatatttatacccgctatgaaggaaagacattattacacgtagcatgtgaatataataatacacaagtaatagattatcttatacgtatcaacggagatataaatgcgttaaccgacaataacaaacacgctacacaactcattatagataacaaagaaaattccccatataccattaattgtttactgtatatacttagatatattgtagataagaatgtgataagatcgttggtggatcaacttccatctctacctatcttcgatataaaatcatttgagaaattcatatcctactgtatacttttagatgacacattttacgataggcacgttaagaatcgcgattctaaaacgtatcgatacgcattttcaaaatacatgtcgtttgataaatacgatggtataataactaaatgtcacgacgaaacaatgttactcaaactgtccactgttctagacactacactatatgcagttttaagatgtcataattcgagaaagttaagaagatacctcaacgagttaaaaaaatataataacgataagtcctttaaaatatattctaatattatgaatgagagataccttaatgtatattataaagatatgtacgtgtcaaaggtatatgataaactatttcctgttttcacagataaaaattgtctactaacattactaccttcagaaattatatacgaaatattatacatgctgacaattaacgatctttataatatatcgtatccacctaccaaagtatagttgtatttttctcatgcgatgtgtgtaaaaaaactgatattatataaatattttagtgccgtataataaagatgacgatgaaaatgatggtacatatatatttcgtatcattattgttattgctattccacagttacgccatagacatcgaaaatgaaatcacagaattcttcaataaaatgagagatactctaccagctaaagactctaaatggttgaatccagcatgtatgttcggaggcacaatgaatgatatagccgctctaggagagccattcagcgcaaagtgtcctcctattgaagacagtcttttatcgcacagatataaagactatgtggttaaatgggagaggctagaaaagaatagacggcgacaggtttctaataaacgtgttaaacatggtgatttatggatagccaactatacatctaaattcagtaaccgtaggtatttgtgcaccgtaactacaaagaatggtgactgtgttcagggtatagttagatctcatattaaaaaacctccttcatgcattccaaaaacatatgaactaggtactcatgataagtatggcatagacttatactgtggaattctttacgcaaaacattataataatataacttggtataaagataataaggaaattaatatcgacgacattaagtattcacaaacgggaaaggaattaattattcataatccagagttagaagatagcggaagatacgactgttacgttcattacgacgacgttagaatcaagaatgatatcgtagtatcaagatgtaaaatacttacggttataccgtcacaagaccacaggtttaaactaatactagatccgaaaatcaacgtaacgataggagaacctgccaatataacatgcactgctgtgtcaacgtcattattgatcgacgatgtactgattgaatgggaaaatccatccggatggcttataggattcgattttgatgtatactctgttttaactagtagaggcggtatcaccgaggcgaccttgtactttgaaaatgttactgaagaatatataggtaatacatataaatgtcgtggacacaactattattttgaaaaaacccttacaactacagtagtattggagtaaatatacaatgcatttttatatacattactgaattattattactgaattattattactgaattattattaattatatcgtatttgtgctatagaatggatgaagatacgcgactatctaggtatttgtatctcaccgatagagaacatataaatgtagactctattaaacagttgtgtaaaatatcagatcctaatgcatgttatagatgtggatgtacggctttacatgagtacttttataattatagatcagtcaacggaaaatacaagtatagatacaacggttactatcaatattattcatctagcgattatgaaaattataatgaatattattatgatagaactggtatgaacagtgagagtgataatatatcaatcaaaacagaatatgaattctatgatgaaacacaagatcaaagtacacaactagtaggttacgacattaaactcaaaaccaatgaggatgattttatggctatgatagatcagtgggtgtccatgattatatagatgaatcaattaataaagtagtatatggaagagagtctcacgtaagatggcgggatatatggcaagaacataatgatggcgtatacagtataggaaaggagtgcatagataatatatacgaagacaaccataccgtagacgaattctacaagatagacagcgtatcagatgtagatgacgcggaacacatatctccgataactaaaaaaccatagaatcagttgatgataatacctacatttctaatcttccgtataccatcaaatacaaaatattcgagcaacaataagtattttttatacctttaaaactgataaataaattttttctagtgatattttggcaagatgagaatcctatttctcatcgctttcatgtatgggtgtgttcactcatatgttaacgcggttgaaaccaaatgtccaaatctagacattgtaacatcttctggagaatttcattgttcaggatgtgtggaacatatgcctgagtttagctatatgtattggttggcaaaggatatgaaatcggacgaggataccaagtttatagaacatctgggtgatggcatcaaagaagatgaaaccgttcgtaccacagatagtggaatcgtcactctacgtaaagtccttcatgtgactgatactaataaatttgataattataggttcacttgtgtcctcgctacgctagatggcatttataaaaagaatgtttgctgaagtagttgtgtgctactatttttatttatgatataatctaatggaattaatttgaattgatatttatccaatactaaagattatattagaatcaaattaatcttttatacgagaaaaaataacgacatacgtcgtcaacaaattaaactttttatttattagttaactagcttatagaacttgctcattgttatgtttctaaaacgggtacggcatataggacaattatccgacgcaccggtttctcttcgtgttctatgccatatattgatgcatgttatgcaaaatatatgagtacacgaatccaataaaccaaagtatctatcgttttgagtaaacaacttcatagcaaattccacattctttttctttacttactctatacacgtcctcgtatttatttagtattttgatgatatccaactcagaaatggttgttgtattattgggtgtatttggagtataggtattattagctatgtaccaatttaccaaccctcttaatattgattgataatcacatcggttatccaattaataactaaattgtagtgtatatatagaccatatatgtttctatttttttgacagttacgtatagtttcagtaagttttgattgttgtattcctgtatctctagataagttagtcatatagtcccttccggcgatacgttttttccaagcccgaaattgattagccaaatgtgtatttatttttgtgatattgatataatatttcggataatgcatactgttagtcttatatcatttggttcatctatgtattgtaatattgttacatgatctatagatgatgtattgattttggcaggatcgaattccatatccgcgactaaacagtgaaaaaaatgtaaatactttttaaattttaaattagtaaaacttttttttattttttatgattccaaaaatactgaatacaaagtcctaaattataaatatggagatcatactaccacaacttattattatgtatacaaggccggtgtaatagatagatatatataattctattacaccggcagacaattaccgaccggtatttgtcgttaccaacataccgtataatatgtaatatacaattccataacccattgacagttgttatacatcaaaattgcaattcttttgattacgatgttataagaatgtagttaattgatgtatgatgttaatgtgtcctctttcctcttataacatcgtaatcaaaaacttttttataatatatacctaataatgtgtcttaatagttctcgtgattcgtcaaacaatcattcttataaaatataataaagcaacgtaaaaacacataaaaataagcgtaactaataagacaatggatatttacgacgataaaggtctacagactattaaactgtttaataatgaatttgattgtataaggaatgacatcagagaattatttaaacatgtaactgattccgatagtatacaacttccgatggaagacaattctgatattatagaaaatatcagaaaaatactatatagacgattaaaaaatgtagaatgtgttgacatcgataacacaataacttttatgaaatacgatccaaatgatgataataagcgtacgtgttctaattgggtacccttaactaataactatatggaatattgtctagtaatatatttggaaacaccgatatgtggaggcaaaataaaattataccaccctacaggaaatataaagtcggataaggatattatgtttgcaaagactctagactttaaatcaacgaaagtgttaactggacgtaaaacaattgccgttctagacatatccgtttcatataatagatcaatgactactattcactacaacgacgacgttgatatagatatacatactgataaaaatggaaaagagttatgttattgttatataacaatagatgatcattacttggttgatgtggaaactataggagttatagtcaatagatctggaaaatgtctgttagtaaataaccatctaggtataggtatcgttaaagataaacgtataagcgatagttttggagatgtatgtatggatacaatatttgacttttctgaagcacgagagttattttcattaactaatgatgataacaggaatatagcatgggacactgataaactagacgatgatacagatatatggactcccgtcacagaagatgattacaaatttctttctagactagtattgtatgcaaaatctcaatcggatactgtatttgactattatgttcttactggtgatacggaaccacccactgtattcattttcaaggtaactagattttactttaatatgccgaaataaaaaatttttgtataatatctagaggtagaggtattgtttagataaatacaaataacatagatacatcgcatacttagcatttttataaatatacataagacatacactttatacatttttgtaaaaatactcataaaaaaatttataaaaattatggcacaaccatatcttgtataggtagtttagttcgtcgagtgaacctataaacagataatagacaacacataataatgcctactaatacaagcataataccgggagatgggatatatgacgttgtagtgtttgggttttctgaacgttgatagtctactaatactacatgctgacatctaatgcctgtataaccatgagagcatctacaatacataccgtcaatatctctagcgtggatacagtcaccgtgtaaacaatatccatctccctctggaccgcataatctgatagctggaatatctgttgtagcgtttgtaatttctggcaatgtcgtttcgatagcgttaccactatcggcgaatgatctgattatcatagcagcgaacaacaacatcagataatttatcaacatttttgatggattctgtgtttatgctgtttctcagtgtgtgtttatgacaagattgggaattttatattattaattcagtaatataaactaataatatattgttaattgtgtaaataatataaaaataacaatacaatattgaatgtgttgctgttaaaaatgtatgtgttaatataatagaataaaataaatgagtatgatcattttagataacgattgattttatcattaccgcttcattcttatattctttgcttacggaacctatatttagaaacatctactaacaattttttatgcttgcattattaatggtatgtaatatgattgattgtgtacgcaataccaatttgttaagtatgaatacggggtacaaacataaattgaaatttaacattatttatttatgatatatatcgttatcgttaggtctataccatggatatctttaaagaactaatcttaaaacaccctgatgaaaatgttttgatttctccagtttccattttatctactttatctattctaaatcatggagcagctggttctacagctgaacaactatcaaaatatatagagaatatgaatgagaatacacccgatgacaataatgatgacatggaggtagatattccgtattgtgcgacactagctaccgcaaataaaatatacggtagcgatagtatcgagttccacgcctccttcctacaaaaaataaaagacgattttcaaactgtaaactttaataatgctaaccaaacaaaggaactaatcaacgaatgggttaagacaatgacaaatggtaaaattaattccttattgactagtccgctatccattaatactcgtatgacagttgttagcgccgtccattttaaagcaatgtggaaatatccattttctaaacatcttacatatacagacaagttttatatttctaagaatatagttaccagcgttgatatgatggtgggtaccgagaataacttgcaatatgtacatattaatgaattattcggaggattctctattatcgatattccatacgagggaaactctagtatggtaattatactaccggacgacatagaaggtatatataacatagaaaaaaatataacagatgaaaaatttaaaaaatggtgtggtatgttatctactaaaagtatagacttgtatatgccaaagtttaaagtggaaatgacagaaccgtataatctggtaccgattttagaaaatttaggacttactaatatattcggatattatgcagattttagcaagatgtgtaatgaaactatcactgtagaaaaatttctacatacgacgtttatagatgttaatgaggagtatacagaagcatcggccgttacaggagtatttacgattaacttttcgatggtatatcgtacgaaggtctacataaaccatccattcatgtacatgattaaagacaccacaggacgtatactttttatagggaaatactgctatccgcaataaatataaacaaatagacttttataaagagtcttcaacgataagtatatcgacatactacttatgctgcgaaagattctgaacgagaacgactatctcaccctcttggatcatatccgcactgctaaatactaaatctccactacactttttatcatcttatgaggaatgattgccttcgtgaaataggaataattagcaccagaatagctatggattattgtggtagagagtgcactattctatgtcgtctactggatgaagatgtgacgtacaaaaaaataaaactagaaattgaaacgtgtcacaacttatcaaaacatatagatagacgaggaaacaatgcgctacattgttacgtctccaataaatgcgatacagacattaagattgttctctcgcggagtcgagagactttgtagaaacaacgaaggattaactccgctaggagtatacagtaagcatagatacgtaaaatctcagattgtgcatctactgatatccagctattcaaattcctctaacgaactcaagtcgaatataaatgatttcgatctgtattcggataatatcgacttacgtctgctaaaatacctaattgtggataaacggatacgtccgtccaagaatacgaattatgcaatcaatggtctcggattggtggatatatacgtaacgacgcctaatccgagaccagaagtattgctatggcttcttaaatcagaatgttacagcaccggttacgtatttcgtacctgtatgtacgacagtgatatgtgtaagaactctcttcattactatatatcgtctcatagagaatctcaatctctatccaaggatgtaattaaatgtttgatcgataacaatgtttccatccatggcagagacgaaggaggatctttacccatccaatactactggtctttctcaaccatagatatagagattgttaaattattattaataaaggatgtggacacgtgtagagtatacgacgtcagccctatattagaggcgtattatctaaacaagcgatttagagtaaccccatataatgtagacatggaaatcgttaatcttcttattgagagacgtcatactcttgtcgacgtaatgcgtagtattacttcgtacgattccagagaatataaccactacatcatcgataacattctaaagagatttagacaacaggatgaatccatcgtacaagccatactgataaactacttacattacggcgatatggtcgttcgatgcatgttagataacggacaacaactatcctctacacgactactttgttaataataatctcgtcgatgtaaacgtcgtaaggtttatcgtggaaaatatggacacgcggctgtaaatcacgtatcgaacaatggccgtctatgtatgtacggtctgatattatcgagatttaataattgcgggtatcactgttatgaaaccatactgatagatgtatttgatatactaagcaagtacatggatgatatagatatgatcgataactctactatattacgcggtcgatgtcaataatatacaatttgcaaagcggttattggaatatggagcgagtatcacgctcgataatcaatacggccatccagaaaagcagttacagaagagaaaacaaaacgaaatcgttgttctacaagatgtctctccctacgacgattactacgtaaaaaagatactagcctactgcctattaagggacgagtcattcgcggaactacatagtaaattctgtttaaacgaggactataaaagtgtatttatgaaaaatatatcattcgataagatagattccatcatcgtgacataagtcgcctcaaagagattcgaatctccgacaccgacctgtatacggtatcacagctatcttaaagccatacattcagacagtcacatttcatttcccatgtacgacgatctcatagaacagtgccatctatcgatggagcgtaaaagtaaactcgtcgacaaagcactcaataaattagagtctaccatcggtcaatctagactatcgtatttgcctccggaaattatgcgcaatatcatctaaacagtatgttgtacggaaagaaccattacaaatattatccatgatagaaagaaaatatctatatgattggagaagtaggaaacaggaacaagacaacgattactacattattaaatcatgaagtccgtattatactcgtatatattgtttctctcatgtataataataaacggaagagatatagcaccgcatgcaccatccgatggaaagtgtaaagacaacgaatacaaacgccataatttgtgtccgggaacatacgcttccagattatgcgatagcaagactaacacacgatgtacgccgtgtggttcgggtaccttcacatctcgcaataatcatttacccgcttgtctaagttgtaacggaagacgcgatcgtgtaacacgactcacaatagaatctgtgaatgctctcccggatattattgtcttctcaaaggatcatccggatgcaaggcatgtgtttcccaaacaaaatgtggaataggatacggagtatccggagacgtcatctgttctccgtgtggtctcggaacatattctcacaccgtctcttccgcagataaatgcgaacccgtacccagaaatacgtttaactatatcgatgtggaaattaacctgtatccagttaacgacacgtcgtgtactcggacgaccactaccggtctcagcgaatccatctcaacgtcggaactaactattactatgaatcataaagactgtaatcccgtatttcgtgatggatacttctccgttcttaataaggtagcgacttcaggtttctttacaggagaaaggtgtgcactctgaatttcgagattaaatgcaataacaaagattcttcctccaaacagttaacgaaagcaaagaatgatactatcatgccgcattcggagacagtaactctagtgggcgacatctatatactatatagtaataccaatactcaagactacgaaactgatacaatctcttatcatgtgggtaatgttctcgatgtcgatagccatatgcccggtagttgcgatatacataaactgatcactaattccaaacccacccactttttatagtaagtttttcacccataaataataaatacaataattaatttctcgtaaaagtagaaaatatattctaatttattgcacggtaaggaagtagaatcataaagaacagtactcaatcaatagcaattatgaaacaatatatcgtcctggcatgcatgtgcctggcggcagctgctatgcctgccagtcttcagcaatcatcctcatcctcctcctcgtgtacggaagaagaaaacaaacatcatatgggaatcgatgttattatcaaagtcacaaagcaagaccaaacaccgaccaatgataagatttgccaatccgtaacggaaattacagagtccgagtcagatccagatcccgaggtggaatcagaagatgattccacatcagtcgaggatgtagatcctcctaccacttattactccatcatcggtggaggtctgagaatgaactttggattcaccaaatgtcctcagattaaatccatctcagaatccgctgatggaaacacagtgaatgctagattgtccagcgtgtccccaggacaaggtaaggactctcccgcgatcactcatgaagaagctcttgctatgatcaaagactgtgaagtgtctatcgacatcagatgtagcgaagaagagaaagacagcgacatcaagacccatccagtactcgggtctaacatctctcataagaaagtgagttacgaagatatcatcggttcaacgatcgtcgatacaaaatgcgtcaagaatctagagtttagcgttcgtatcggagacatgtgcaaggaatcatctgaacttgaggtcaaggatggattcaagtatgtcgacggatcggcatctgaaggtgcaaccgatgatacttcactcatcgattcaacaaaactcaaagcgtgtgtctgaatcgataactctattcatctgaaattggatgagtagggttaatcgaacgattcaggcacaccacgaattaaaaaagtgtaccggacactatattccggtttgcaaaacaaaaatgttcttaactacattcacaaaaagttacctctcgcgacttcttctttttctgtctcaatagtgtgatacgattatgacactattcctattcctattcctatttcctttcagagtatcacaaaaatattaaacctctttctgatggtctcataaaaaaagttttacaaaaatatttttattctctttctctctttgatggtctcataaaaaaagttttacaaaaatatttttattctctttctctctttgatggtctcataaaaaaagttttacaaaaatatttttattctctttctctctttgatggtctcataaaaaaagttttacaaaaatatttttattctctttctctctttgatggtctcataaaaaaagttttacaaaaatatttttattctctttctctctttgatggtctcataaaaaaagttttacaaaaatatttttattctctttctctctttgatggtctcataaaaaaagttttacaaaaatatttttattctctttctctctttgatggtctcataaaaaaagttttacaaaaatatttttattctctttctctctttgatggtctcataaaaaaagttttacaaaaatatttttattctctttctctctttgatggtctcataaaaaaagttttacaaaaatatttttattctctttctctctttgatggtctcataaaaaaagttttacaaaaatatttttattctctttctctctttgatggtctcataaaaaaagttttacaaaaatatttttattctctttctctctttgatggtctcataaaaaagttttacaaaaatatttttattctctttctctctttgatggtctcataaaaaagttttacaaaaatatttttattctctttctctctttgatggtctcataaaaaaagttttacaaaaatatttttattctctttctctctttgatggtctcataa

SEQ ID NO: 4 - DNA, 199502 bp, Artificial Sequence
  Vaccinia virus GLV-1h254 genome
ttatgagaccatcaaagagagaaagagaataaaaatatttttgtaaaactttttttatgagaccatcaaagagagaaagagaataaaaatatttttgtaaaacttttttatgagaccatcaaagagagaaagagaataaaaatatttttgtaaaacttttttatgagaccatcaaagagagaaagagaataaaaatatttttgtaaaactttttttatgagaccatcaaagagagaaagagaataaaaatatttttgtaaaactttttttatgagaccatcaaagagagaaagagaataaaaatatttttgtaaaactttttttatgagaccatcaaagagagaaagagaataaaaatatttttgtaaaactttttttatgagaccatcaaagagagaaagagaataaaaatatttttgtaaaactttttttatgagaccatcaaagagagaaagagaataaaaatatttttgtaaaactttttttatgagaccatcaaagagagaaagagaataaaaatatttttgtaaaactttttttatgagaccatcaaagagagaaagagaataaaaatatttttgtaaaactttttttatgagaccatcaaagagagaaagagaataaaaatatttttgtaaaactttttttatgagaccatcaaagagagaaagagaataaaaatatttttgtaaaactttttttatgagaccatcaaagagagaaagagaataaaaatatttttgtaaaactttttttatgagaccatcaaagagagaaagagaataaaaatatttttgtaaaactttttttatgagaccatcagaaagaggtttaatatttttgtgatactctgaaaggaaataggaataggaataggaatagtgtcataatcgtatcacactattgagacagaaaaagaagaagtcgcgagaggtaactttttgtgaatgtagttaagaacatttttgttttgcaaaccggaatatagtgtccggtacacttttttaattcgtggtgtgcctgaatcgttcgattaaccctactcatccaatttcagatgaatagagttatcgattcagacacacgctttgagttttgttgaatcgatgagtgaagtatcatcggttgcaccttcagatgccgatccgtcgacatacttgaatccatccttgacctcaagttcagatgattccttgcacatgtctccgatacgaacgctaaactctagattcttgacgcattttgtatcgacgatcgttgaaccgatgatatcttcgtaactcactttcttatgagagatgttagacccgagtactggatgggtcttgatgtcgctgtctttctcttcttcgctacatctgatgtcgatagacacttcacagtctttgatcatagcaagagcttcttcatgagtgatcgcgggagagtccttaccttgtcctggggacacgctggacaatctagcattcactgtgtttccatcagcggattctgagatggatttaatctgaggacatttggtgaatccaaagttcattctcagacctccaccgatgatggagtaataagtggtaggaggatctacatcctcgactgatgtggaatcatcttctgattccacctcgggatctggatctgactcggactctgtaatttccgttacggattggcaaatcttatcattggtcggtgtttggtcttgctttgtgactttgataataacatcgattcccatatgatgtttgttttcttcttccgtacacgaggaggaggatgaggatgattgctgaagactggcaggcatagcagctgccgccaggcacatgcatgccaggacgatatattgtttcataattgctattgattgagtactgttctttatgattctacttccttaccgtgcaataaattagaatatattttctacttttacgagaaattaattattgtatttattatttatgggtgaaaaacttactataaaaagtgggtgggtttggaattagtgatcagtttatgtatatcgcaactaccgggcatatggctatcgacatcgagaacattacccacatgataagagattgtatcagtttcgtagtcttgagtattggtattactatatagtatatagatgtcgcccactagagttactgtctccgaatgcggcatgatagtatcattctttgctttcgttaactgtttggaggaagaatctttgttattgcatttaatctcgaaattcagagtgcacacctttctcctgtaaagaaacctgaagtcgctaccttattaagaacggagaagtatccatcacgaaatacgggattacagtctttatgattcatagtaatagttagttccgacgttgagatggattcgctgagaccggtagtggtcgtccgagtacacgacgtgtcgttaactggatacaggttaatttccacatcgatatagttaaacgtatttctgggtacgggttcgcatttatctgcggaagagacggtgtgagaatatgttccgagaccacacggagaacagatgacgtctccggatactccgtatcctattccacattttgtttgggaaacacatgccttgcatccggatgatcctttgagaagacaataatatccgggagagcattcacagattctattgtgagtcgtgttacacgatcgcgtcttccgttacaacttagacaagcgggtaaatgattattgcgagatgtgaaggtacccgaaccacacggcgtacatcgtgtgttagtcttgctatcgcataatctggaagcgtatgttcccggacacaaattatggcgtttgtattcgttgtctttacactttccatcggatggtgcatgcggtgctatatctcttccgtttattattatacatgagagaaacaatatatacgagtataatacggacttcatgatttaataatgtagtaatcgttgtcttgttcctgtttcctacttctccaatcatatagatattttctttctatcatggataatatttgtaatggttctttccgtacaacatactgtttagatgatattgcgcataatttccggaggcaaatacgatagtctagattgaccgatggtagactctaatttattgagtgctttgtcgacgagtttacttttacgctccatcgatagatggcactgttctatgagatcgtcgtacatgggaaatgaaatgtgactgtctgaatgtatggctttaagatagctgtgataccgtatacaggtcggtgtcggagattcgaatctctttgaggcgacttatgtcacgatgatggaatctatcttatcgaatgatatatttttcataaatacacttttatagtcctcgtttaaacagaatttactatgtagttccgcgaatgactcgtcccttaataggcagtaggctagtatcttttttacgtagtaatcgtcgtagggagagacatcttgtagaacaacgatttcgttttgttttctcttctgtaactgcttttctggatggccgtattgattatcgagcgtgatactcgctccatattccaataaccgctttgcaaattgtatattattgacatcgaccgcgtaatatagtagagttatcgatcatatctatatcatccatgtacttgcttagtatatcaaatacatctatcagtatggtttcataacagtgatacccgcaattattaaatctcgataatatcagaccgtacatacatagacggccattgttcgatacgtgatttacagccgcgtgtccatattttccacgataaaccttacgacgtttacatcgacgagattattattaacaaagtagtcgtgtagaggatagttgttgtccgttatctaacatgcatcgaacgaccatatcgccgtaatgtaagtagtttatcagtatggcttgtacgatggattcatcctgttgtctaaatctctttagaatgttatcgatgatgtagtggttatattctctggaatcgtacgaagtaatactacgcattacgtcgacaagagtatgacgtctctcaataagaagattaacgatttccatgtctacattatatggggttactctaaatcgcttgtttagataatacgcctctaatatagggctgacgtcgtatactctacacgtgtccacatcctttattaataataatttaacaatctctatatctatggttgagaaagaccagtagtattggatgggtaaagatcctccttcgtctctgccatggatggaaacattgttatcgatcaaacatttaattacatccttggatagagattgagattctctatgagacgatatatagtaatgaagagagttcttacacatatcactgtcgtacatacaggtacgaaatacgtaaccggtgctgtaacattctgatttaagaagccatagcaatacttctggtctcggattaggcgtcgttacgtatatatccaccaatccgagaccattgattgcataattcgtattcttggacggacgtatccgtttatccacaattaggtattttagcagacgtaagtcgatattatccgaatacagatcgaaatcatttatattcgacttgagttcgttagaggaatttgaatagctggatatcagtagatgcacaatctgagattttacgtatctatgcttactgtatactcctagcggagttaatccttcgttgtttctacaaagtctctcgactccgcgagagaacaatcttaatgtctgtatcgcatttattggagacgtaacaatgtagcgcattgtttcctcgtctatctatatgttttgataagttgtgacacgtttcaatttctagttttatttttttgtacgtcacatcttcatccagtagacgacatagaatagtgcactctctaccacaataatccatagctattctggtgctaattattcctatttcacgaaggcaatcattcctcataagatgataaaaagtgtagtggagatttagtatttagcagtgcggatatgatccaagagggtgagatagtcgttctcgttcagaatctttcgcagcataagtagtatgtcgatatacttatcgttgaagactctttataaaagtctatttgtttatatttattgcggatagcagtatttccctataaaaagtatacgtcctgtggtgtctttaatcatgtacatgaatggatggtttatgtagaccttcgtacgatataccatcgaaaagttaatcgtaaatactcctgtaacggccgatgcttctgtatactcctcattaacatctataaacgtcgtatgtagaaatttttctacagtgatagtttcattacacatcttgctaaaatctgcataatatccgaatatattagtaagtcctaaattttctaaaatcggtaccagattatacggttctgtcatttccactttaaactttggcatatacaagtctatacttttagtagataacataccacaccattttttaaatttttcatctgttatatttttttctatgttatatataccttctatgtcgtccggtagtataattaccatactagagtttccctcgtatggaatatcgataatagagaatcctccgaataattcattaatatgtacatattgcaagttattctcggtacccaccatcatatcaacgctggtaactatattcttagaaatataaaacttgtctgtatatgtaagatgtttagaaaatggatatttccacattgctttaaaatggacggcgctaacaactgtcatacgagtattaatggatagcggactagtcaataaggaattaattttaccatttgtcattgtcttaacccattcgttgattagttcctttgtttggttagcattattaaagtttacagtttgaaaatcgtcttttattttttgtaggaaggaggcgtggaactcgatactatcgctaccgtatattttatttgcggtagctagtgtcgcacaatacggaatatctacctccatgtcatcattattgtcatcgggtgtattctcattcatattctctatatattttgatagttgttcagctgtagaaccagctgctccatgatttagaatagataaagtagataaaatggaaactggagaaatcaaaacattttcatcagggtgttttaagattagttctttaaagatatccatggtatagacctaacgataacgatatatatcataaataaataatgttaaatttcaatttatgtttgtaccccgtattcatacttaacaaattggtattgcgtacacaatcaatcatattacataccattaataatgcaagcataaaaaattgttagtagatgtttctaaatataggttccgtaagcaaagaatataagaatgaagcggtaatgataaaatcaatcgttatctaaaatgatcatactcatttattttattctattatattaacacatacatttttaacagcaacacattcaatattgtattgttatttttatattatttacacaattaacaatatattattagtttatattactgaattaataatataaaattcccaatcttgtcataaacacacactgagaaacagcataaacacagaatccatcaaaaatgttgataaattatctgatgttgttgttcgctgctatgataatcagatcattcgccgatagtggtaacgctatcgaaacgacattgccagaaattacaaacgctacaacagatattccagctatcagattatgcggtccagagggagatggatattgtttacacggtgactgtatccacgctagagatattgacggtatgtattgtagatgctctcatggttatacaggcattagatgtcagcatgtagtattagtagactatcaacgttcagaaaacccaaacactacaacgtcatatatcccatctcccggtattatgcttgtattagtaggcattattatgtgttgtctattatctgtttataggttcactcgacgaactaaactacctatacaagatatggttgtgccataatttttataaatttttttatgagtatttttacaaaaatgtataaagtgtatgtcttatgtatatttataaaaatgctaagtatgcgatgtatctatgttatttgtatttatctaaacaatacctctacctctagatattatacaaaaattttttatttcggcatattaaagtaaaatctagttaccttgaaaatgaatacagtgggtggttccgtatcaccagtaagaacataatagtcaaatacagtatccgattgagattttgcatacaatactagtctagaaagaaatttgtaatcatcttctgtgacgggagtccatatatctgtatcatcgtctagtttatcagtgtcccatgctatattcctgttatcatcattagttaatgaaaataactctcgtgcttcagaaaagtcaaatattgtatccatacatacatctccaaaactatcgcttatacgtttatctttaacgatacctatacctagatggttatttactaacagacattttccagatctattgactataactcctatagtttccacatcaaccaagtaatgatcatctattgttatataacaataacataactcttttccatttttatcagtatgtatatctatatcaacgtcgtcgttgtagtgaatagtagtcattgatctattatatgaaacggatatgtctagaacggcaattgttttacgtccagttaacactttcgttgatttaaagtctagagtctttgcaaacataatatccttatccgactttatatttcctgtagggtggtataattttattttgcctccacatatcggtgtttccaaatatattactagacaatattccatatagttattagttaagggtacccaattagaacacgtacgcttattatcatcatttggatcgtatttcataaaagttattgtgttatcgatgtcaacacattctacattttttaatcgtctatatagtatttttctgatattttctataatatcagaattgtcttccatcggaagttgtatactatcggaatcagttacatgtttaaataattctctgatgtcattccttatacaatcaaattcattattaaacagtttaatagtctgtagacctttatcgtcgtaaatatccattgtcttattagttacgcttatttttatgtgtttttacgttgctttattatattttataagaatgattgtttgacgaatcacgagaactattaagacacattattaggtatatattataaaaaagtttttgattacgatgttataagaggaaagaggacacattaacatcatacatcaattaactacattcttataacatcgtaatcaaaagaattgcaattttgatgtataacaactgtcaatgggttatggaattgtatattacatattatacggtatgttggtaacgacaaataccggtcggtaattgtctgccggtgtaatagaattatatatatctatctattacaccggccttgtatacataataataagttgtggtagtatgatctccatatttataatttaggactttgtattcagtatttttggaatcataaaaaataaaaaaaagttttactaatttaaaatttaaaaagtatttacatttttttcactgtttagtcgcggatatggaattcgatcctgccaaaatcaatacatcatctatagatcatgtaacaatattacaatacatagatgaaccaaatgatataagactaacagtatgcattatccgaaatattatatcaatatcacaaaaataaatacacatttggctaatcaatttcgggcttggaaaaaacgtatcgccggaagggactatatgactaacttatctagagatacaggaatacaacaatcaaaacttactgaaactatacgtaactgtcaaaaaaatagaaacatatatggtctatatatacactacaatttagttattaattggataaccgatgtgattatcaatcaatattaagagggttggtaaattggtacatagctaataatacctatactccaaatacacccaataatacaacaaccatttctgagttggatatcatcaaaatactaaataaatacgaggacgtgtatagagtaagtaaagaaaaagaatgtggaatttgctatgaagttgtttactcaaaacgatagatactttggtttattggattcgtgtactcatatattttgcataacatgcatcaatatatggcatagaacacgaagagaaaccggtgcgtcggataattgtcctatatgccgtacccgttttagaaacataacaatgagcaagttctataagctagttaactaataaataaaaagtttaatttgttgacgacgtatgtcgttattttttctcgtataaaagattaatttgattctaatataatctttagtattggataaatatcaattcaaattaattccattagattatatcataaataaaaatagtagcacacaactacttcagcaaacattctttttataaatgccatctagcgtagcgaggacacaagtgaacctataattatcaaatttattagtatcagtcacatgaaggactttacgtagagtgacgattccactatctgtggtacgaacggtttcatcttctttgatgccatcacccagatgttctataaacttggtatcctcgtccgatttcatatcctttgccaaccaatacatatagctaaactcaggcatatgttccacacatcctgaacaatgaaattctccagaagatgttacaatgtctagatttggacatttggtttcaaccgcgttaacatatgagtgaacacacccatacatgaaagcgatgagaaataggattctcatcttgccaaaatatcactagaaaaaatttatttatcagttttaaaggtataaaaaatacttattgttgctcgaatattttgtatttgatggtatacggaagattagaaatgtaggtattatcatcaactgattctatggttttatgtattctatcatgtttcactattgcgttggaaataatatcatatgcttccacatatattttattttgttttaactcataatactcacgtaattctggattattggcatatctatgaataattttagctccatgatcagtaaatattaatgagaacatagtattaccacctaccattatttttttcatctcattcaattcttaattgcaaagatctatataatcattatagcgttgacttatggactctggaatcttagacgatgtacagtcatctataatcatggcatatttaatacattgttttatagcatagtcgttatctacgatgttagatatttctctcaatgaatcaatcacacaatctaatgtaggtttatgacataatagcattttcagcagttcaatgtttttagattcgttgatggcaatggctatacatgtatatccgttatttgatctaatgttgacatctgaaccggattctagcagtaaagatactagagattgtttattatatctaacagccttgtgaagaagtgtttctcctcgtttgtcaatcatgttaatgtctttaagataaggtaggcaaatgtttatagtactaagaattgggcaagcataagacatgtcacaaagacccttttttgtatgtataagtgtaaaaattataacatccatagttggatttacataggtgtccaatcgggatctctccatcatcgagataattgatggcatctcccttccttttttagtagatatttcatcgtgtaagaatcaatattaatatttctaaagtatccgtgtatagcctctttatttaccacagctccatattccactagagggatatcgccgaatgtcatatactcaattagtatatgttggaggacatccgagttcattgttttcaatatcaaagagatggtttccttatcatttctccatagtggtacaatactacacattattccgtgcggctttccattttccaaaaacaatttgaccaaatctaaatctacatctttattgtatctataatcactatttagataatcagccataattcctcgagtgcaacatgttagatcgtctatatatgaataagcagtgttatctattcctttcattaacaatttaacgatgtctatatctatatgagatgacttaatataatattgaagagctgtacaatagtttttatctataaaagacggcttgattccgtgattaattagacatttaacaacttccggacgcacatatgctctcgtatccgactctgaatacagatgagagatgatatacagatgcaatacggtaccgcaatttcgtagttgataatcatcatacgcgtatcagtactcgtcctcataaagaacactgcagccattttctatgaacaaatcaataattttagaaacaggatcattgtcattacataattttctataactgaacgatggttttcacatttaacactcaagtcaaatccatgttctaccaacacctttatcaagtcaacgtctacatttttggatttcatatagctgaatatattaaagttatttatgttgctaaatccagtggcttctagtagagccatcgctatatccttattaactttaacatgtctactatttgtgtattcttctaatggggtaagctgtctccaatttttgcgtaatggattagtgccactgtctagtagtagtttgacgacctcgacattattacaatgctcattaaaaaggtatgcgtgtaaagcattattcttgaattggttcctggtatcattaggatctctgtctttcaacatctgtttaagttcatcaagagccacctcctcattttccaaatagtcaaacattttgactgaatgagctactgtgaactctatacacccacacaactaatgtcattaaatatcatgtcaaaaacttgtacaattattaataaaaataatttagtgtttaaattttaccagttccagattttacacctccgttaatacctccattaaccccactggacgatcctcctccccacattccaccgccaccagatgtataagttttagatcctttattactaccatcatgtccatggataaagacactccacatgccgccactaccccctttagaagacatattaataagacttaaggacaagtttaacaataaaattaatcacgagtaccctactaccaacctacactattatatgattatagtttctatttttacagtaccttgactaaagtttctagtcacaagagcaatactaccaacctacactattatatgattatagtttctatttttataggaacgcgtacgagaaaatcaaatgtctaatttctaacggtagtgttgataaacgattgttatccgcggatacctcctctatcatgtcgtctattttcttactttgttctattaacttattagcattatatattatttgattataaaacttatattgcttattagcccaatctgtaaatatcggattattaacatatcgtttctttgtaggtttatttaacatgtacatcactgtaagcatgtccttaccatttattttaatttgacgcatatccgcaatttctttttcgcagtcggttataaattctatatatgatggatacatgctacatgtgtacttataatcgactaatatgaagtacttgatacatattttcagtaacgatttattattaccacctatgaataagtacctgtgatcgtctaggtaatcaactgttttcttaatacattcgatggttggtaatttactcagaataatttccaatatcttaatatataattctgctatttctgggatatatttatctgccagtataacacaaatagtaatacatgtaaacccatattttgttattatattaatgtctgcgccattatctattaaccattctactaggctgacactatgcgactcaatacaatgataaagtatactacatccatgtttatctattttgtttatatcatcaatatacggcttacaaagttttagtatcgataacacatccaactcacgcatagagaaggtagggaataatggcataatatttattaggttatcatcattgtcattatctacaactaagtttccattttttaaaatatactcgacaactttaggatctctattgccaaatttttgaaaatatttatttatatgcttaaatctatataatgtagctccttcatcaatcatacatttaataacattgatgtatactgtatgataagatacatattctaacaatagatcttgtatagaatctgtatatcttttaagaattgtggatattaggatattattacataaactattacacaattctaaaatataaaacgtatcacggtcgaataatagttgatcaactatataattatcgattttgtgatttttcttcctaaactgtttacgtaaatagttagatagaatattcattagttcatgaccactatagttactatcgaataacgcgtcaaatatttcccgtttaatatcgcatttgtcaagataataatagagtgtggtatgttcacgataagtataataacgcatctctttttcgtgtgaaattaaatagtttattacgtccaaagatgtagcataaccatcttgtgacctagtaataatataataatagagaactgttttacccattctatcatcataatcagtggtgtagtcgtaatcgtaatcgtctaattcatcatcccaattataatattcaccagcacgtctaatctgttctattttgatcttgtatccatactgtatgttgctacatgtaggtattcctttatccaataatagtttaaacacatctacattgggatttgatgttgtagcgtatttttctacaatattaataccatttttgatactatttatttctatacctttcgaaattagtaatttcaataagtctatattgatgttatcagaacatagatattcgaatatatcaaaatcattgatatttttatagtcgactgacgacaataacaaaatcacaacatcgtttttgatattattatttttcttggtaacgtatgcctttaatggagtttcaccatcatactcatataatggatttgcaccactttctatcaatgattgtgcactgctggcatcgatgttaaatgttttacaactatcatagagtatcttatcgttaaccatgattggttgttgatgctatcgcattttttggtttctttcatttcagttatgtatggatttagcacgtttgggaagcatgagctcatatgatttcagtactgtagtgtcagtactattagtttcaataagatcaatctctagatctatagaatcaaaacacgataggtcagaagataatgaatatctgtaggcttcttgttgtactgtaacttctggttttgttagatggttgcatcgtgctttaacgtcaatggtacaaattttatcctcgctttgtgtatcatattcgtccctactataaaattgtatattcagattatcatgcgatgtgtatacgctaacggtatcaataaacggagcacaccatttagtcataaccgtaatccaaaaatttttaaagtatatcttaacgaaagaagttgtgtcattgtctacggtgtatggtactagatcctcataagtgtatatatctagagtaatgtttaatttattaaatggttgataatatggatcctcgtgacaatttccgaagatggaaataagacataaacacgcaataaatctaattgcggacatggttactccttaaaaaaatacgaataatcaccttggctatttagtaagtgtcatttaacactatactcatattaatccatggactcataatctctatacgggattaacggatgttctatatacggggatgagtagttctcttctttaactttatactttttactaatcatatttagactgatgtatgggtaatagtgtttgaagagctcgttctcatcatcagaataaatcaatatctctgtttttttgttatacagatgtattacagcctcatatattacgtaatagaacgtgtcatctaccttattaactttcaccgcatagttgtttgcaaatacggttaatcctttgacctcgtcgatttccgaccaatctgggcgtataatgaatctaaactttaattgcttgtaatcattcgaaataatttttagtttgcatccgtagttatcccctttatgtaactgtaaatttctcaacgcgatatctccattaataatgatgtcgaattcgtgctgtatacccatactgaatggatgaacgaataccgacggcgttaatagtaatttactttttcatctttacatattgggtactagttttactatcataagtttataaattccacaagctactatggaataagccaaccatcttagtataccacacatgtcttaaagtttattaattaattacatgttgttttatatatatcgctacgaatttaaagagaaattagtttaggaagaaaaattatctatctacatcatcacgtctctgtattctacgatagagtgctactttaagatgcgacagatccgtgtcatcaaatatatactccattaaaatgattattccggcagcgaacttgatattggatatatcacaacctttgttaatatctacgacaatagacagcagtcccatggttccataaacagtgagtttatctttctttgaagagatattttgtagagatcttataaaactgtcgaatgacatcgcatttatatctttagctaaatcgtatatgttaccatcgtaatatctaaccgcgtctatcttaaacgtttccatcgctttaaagacgtttccgatagatggtctcatttcatcagtcatactgagccaacaaatataatcgtgtataacatctttgatagaatcagactctaaagaaaacgaatcggctttattatacgcattcatgataaacttaatgaaaaatgtttttcgttgtttaagttggatgaatagtatgtcttaataattgttattatttcattaattaatatttagtaacgagtacactctataaaaacgagaatgacataactaatcataactagttatcaaagtgtctaggacgcgtaattttcatatggtatagatcctgtaagcattgtctgtattctggagctattttctctatcgcattagtgagttcagaatatgttataaatttaaatcgaataacgaacataactttagtaaagtcgtctatattaactcttttattttctagccatcgtaataccatgtttaagatagtatattctctagttactacgatctcatcgttgtctagaatatcacatactgaatctacatccaattttagaaattggtctgtgttacatatctcttctatattattgttgatgtattgtcgtagaaaactattacgtagaccattttctttataaaacgaatatatagtactccaattatctttaccgatatatttgcacacataatccattctctcaatcactacatctttaagattttcgttgttaagatatttggctaaactatataattctattagatcatcaacagaatcagtatatatttttctagatccaaagacgaactctttggcgtcctctataatattcccagaaaagatattttcgtgttttagtttatcgagatctgatctgttcatatacgccatgattgtacggtacgttatgataaccgcataaaataaaaatccattttcatttttaaccaatactattcataattgagattgatgtaatactttgttactttgaacgtaaagacagtacacggatccgtatctccaacaagcacgtagtaatcaaatttggtgttgttaaacttcgcaatattcatcaatttagatagaaacttatactcatcatctgttttaggaatccatgtattattaccactttccaacttatcattatcccaggctatgtttcgtccatcatcgttgcgcagagtgaataattcttttgtattcggtagttcaaatatatgatccatgcatagatcggcaaagctattgtagatgtgatttttcctaaatctaatataaaactcgtttactagcaaacactttcctgatttatcgaccaagacacatatggtttctaaatctatcaagtggtggggatccatagttatgacgcagtaacatatattattacattcttgactgtcgctaatatctaaatatttattgttatcgtattggattctgcatatagatggcttgtatgtcaaagatatagaacacataaccaatttatagtcgcgctttacattctcgaatctaaagttaagagatttagaaaacattatatcctcggatgatgttatcactgtttctggagtaggatatattaaagtctttacagatttcgtccgattcaaataaatcactaaataatatcccacattatcatctgttagagtagtatcattaaatctattatattttatgaaagatatatcactgctcacctctatatttcgtacatttttaaactgtttgtataatatctctctgatacaatcagatatatctattgtgtcggtagacgataccgttacatttgaattaatggtgttccattttacaacttttaacaagttgaccaattcatttctaatagtatcaaactctccatgattaaatattttaatagtatccattttatatcactacggacacaaagtagctgacataaaccattgtataatttttatgttttatgtttattagcgtacacattttggaagttccggcttccatgtatttcctggagagcaagtagatgatgaggaaccagatagtttatatccgtacttgcacttaaagtctacattgtcgttgtatgagtatgatcttttaaacccgctagacaagtatccgtttgatattgtaggatgtggacatttaacaatctgacacgtgggtggatcggaccattctcctcctgaacacaggacactagagttaccaatcaacgaatatccactattgcaactataagttacaacgctcccatcggtataaaaatcctcgtatccgttatgtcttccgttggatatagatggaggggattggcatttaacagattcacaaataggtgcctcgggattccataccatagatccagtagatcctaattcacaatacgatttagattcaccgatcaactgatatccgctattacaagagtacgttatactagagccaaagtctactccaccaatatcaagttggccattatcgatatctcgaggcgatgggcatctccgtttaatacattgattaaagagtgtccatccagtacctgtacatttagcatatataggtcccattttttgctttctgtatccaggtagacatagatattctatagtgtctcctatgttgtaattagcattagcatcagtctccacactattcttaaatttcatattaatgggtcgtgacggaatagtacagcatgatagaacgcatcctattcccaacaatgtcaggaacgtcacgctctccaccttcatatttatttatccgtaaaaatgttatcctggacatcgtacaaataataaaaagcccatatatgttcgctattgtagaaattgtttttcacagttgctcaaaaacgatggcagtgacttatgagttacgttacactttggagtctcatctttagtaaacatatcataatattcgatattacgagttgacatatcgaacaaattccaagtatttgattttggataatattcgtattttgcatctgctataattaagatataatcaccgcaagaacacacgaacatctttcctacatggttaaagtacatgtacaattctatccatttgtcttccttaactatatatttgtatagataattacgagtctcgtgagtaattccagtaattacatagatgtcgccgtcgtactctacagcataaactatactatgatgtctaggcatgggagacttttttatccaacgatttttagtgaaacattccacatcgtttaatactacatatttctcatacgtggtataaactccacccattacatatatatcatcgtttacgaataccgacgcgcctgaatatctaggagtaattaagtttggaagtcttatccatttcgaagtgccgtgtttcaaatattctgccacacccgttgaaatagaaaattctaatcctcctattacatataactttccatcgttaacacaagtactaacttctgattttaacgacgacatattagtaaccgttttccattttttcgttttaagatctacccgcgatacggaataaacatgtctattgttaatcatgccgccaataatgtatagacaattatgtaaaacatttgcattatagaattgtctatctgtattaccgactatcgtccaatattctgttctaggagagtaatgggttattgtggatatataatcagagtttttaatgactactatattatgttttataccatttcgtgtcactggctttgtagatttggatatagttaatcccaacaatgatatagcattgcgcatagtattagtcataaacttgggatgtaaaatgttgatgatatctacatcgtttggatttttatgtatccactttaataatatcatagctgtaacatcctcatgatttacgttaacgtcttcgtgggataagatagttgtcagttcatcctttgataattttccaaattctggatcggatgtcaccgcagtaatattgttgattatttctgacatcgacgcattatatagttttttaattccatatcttttagaaaagttaaacatccttatacaatttgtgaaattaatattatgaatcatagtttttacacatagatctactacaggcggaacatcaattattatggcagcaactagtatcatttctacattgtttatggtgatgtttatcttcttccagcgcatatagtctaatagcgattcaaacgcgtgatagtttataccattcaatataatcgcttcatcctttagatggtgatcctgaatgcgtttaaaaaaattatacggagacgccgtaataatttccttattcacttgtataatttccccattgatagaaaatattacgctttccattcttaaagtactataagtaattatagtataatgtaaacgtttatatattcaatatttttataaaaatcattttgacattaattcctttttaaatttccgtctatcatctatagaaacgtattctatgaatttataaaatgcttttacgtgtcctatcgtaggcgatagaaccgctaaaaagcctatcgaatttctacaaaagaatctgttatatggtatagggagagtataaaacattaaatgtccgtacttattaaagtattcagtagccaatcctaactctttcgaatacttattaatggctcttgttctgtacgaatctatttttttgaacaacggacctagtggtatatcttgttctatgtatctaaaataatgtctgactagatccgttagtttaatatccgcagtcatcttgtctagaatggcaaatctaactgcgggtttaggctttagtttagtttctatatctacatctatgtctttatctaacaccaaaaatataatagctaatattttattacaatcatccggatattcttctacgatctcactaactaatgtttctttggttatactagtatagtcactatcggacaaataaagaaaatcagatgatcgatgaataatacatttaaattcatcatctgtaagatttttgagatgtctcattagaatattattagggttagtactcattatcattcggcagctattacttattttattatttttcaccatatagatcaatcattagatcatcaaaatatgtttcaatcatcctaaagagtatggtgaatgactcttcccatctaatttctgaacgttcaccaatgtctctagccactttggcactaatagcgatcattcgcttagcgtcttctatattattaactggttgatttaatctatctagcaatggaccgtcggacagcgtcattctcatgttcttaatcaatgtacatacatcgccgtcatctaccaattcatccaacaacataagctttttaaaatcatcattataataggtttgatcgttgtcatttctccaaagaatatatctaataagtagagtcctcatgcttagttaacaactattttttatgttaaatcaattagtacaccgctatgtttaatacttattcatattttagtttttaggattgagaatcaatacaaaaattaatgcatcattaattttagaaatacttagtttccacgtagtcaatgaaacatttgaactcatcgtacaggacgttctcgtacaggacgtaactataaaccggtttatatttgttcaagatagatacaaatccgataactttttttacgaattctacgggatccactttaaaagtgtcataccgggttctttttatttttttaaacagatcaatggtgtgatgttgattaggtcttttacgaatttgatatagaatagcgtttacatattctccataatggtcaatcgccatttgttcgtatgtcataaattctttaattatatgacactgtgtattatttagttcatccttgttcattgttaggaatctatccaaaatggcaattatactagaactataggtgcgttgtatacacatattgatgtgtctgtttatacaatccatgatatttggatccatgctactaccttcgggtaaaattgtagcatcatataccatttctagtactttaggttcattattatccattgcagaggacgtcatgatcgaatcataaaaaaatatattatttttatgttattttgttaaaaataatcatcgaatacttcgtaagatactccttcatgaacataatcagttacaaaacgtttatatgaagtaaagtatctacgatttttacaaaagtccggatgcataagtacaaagtacgcgataaacggaataataatagatttatctagtctatctttttctatagctttcatagttagatacatggtctcagaagtaggattatgtaacatcagcttcgataaaatgactgggttatttagtcttacacattcgctcatacatgtatgaccgttaactacagagtctacactaaaatgattgaacaatagatagtctaccattgtttcgtattcagatagtacagcgtagtacatggcatcttcacaaattatatcattgtctaatagatatttgacgcatcttatggatcccacttcaacagccatcttaaaatcatattgctttcctttatcattaataatttctagaacatcatctctatcataaaagatacaaatattaactgtttgatccgtaataacattgctagtcaatagcaatttgttaataagatgcgctgggctcaatgtcttaataagaagtgtaagaggactatctccgaatttgttttgtttattaacatccgttgatggaagtaaaagatctataatgtctacattcttgactgttttagagcatacaatatggagaggtgtatttccatcatgatctggttttgagggactaattcctagtttcatcatccatgagattgtagaagcttttggattgtctgacataagatgtctatgaatatgatttttgccaaatttatccactatcctggcttcgaatccgatggacattatttttttaaacactctttctgaaggatctgtacacgccaacaacggaccacatccttcttcatcaaccgagttgttaatcttggctccatactgtaccaataaatttattctctctatgacttcatcatctgttcccgagagataatatagaggtgttttatgctgtttatcacacgcgtttggatctgcgccgtgcgtcagcagcatcgcgactattctattattattaattttagaagctatatgcaatggataatttccatcatcatccgtctcatttggagagtatcctctatgaagaagttcttcgacaaatcgttcatctagtcctttaattccacaatacgcatgtagaatgtgataattatttccagaaggttcgatagcttgtagcatattcctaaatacatctaaatttttactattatatttggcataaagagatagataatactcggccgacataatgttgtccattgtagtataaaaattaatatttctatttctatttctgtatatttgcaacaatttactctctataacaaatatcataacttagtttttttatgtcaagaaggcactggtttagttcatctataaatgtcacgccataactaccacgcatgccatactcagaattatgataaagatatttatccttggggtgtaggtaatggggattaatctttgttggatcagtctctaagttaacacatgtcacacatgatccatttatagttatatcacacgatgatgatttatgaattgattccggaagatcgctatcgtattttgtggttccacaattcatttccatacatgttattgtcacactaatattatgatgaactttatctagccgctgagtggtaaacaacagaacagatagtttattatctttaccaacaccctcagccgctgccacaaatctctgatccgtatccatgatggtcatgtttatttctagtccgtatccagtcaacactatgttagcatttctgtcgatatagctttcactcatatgacactcaccaataatagtagaattaatgtcgtaatttacaccaatagtgagttcggcggcaaagtaccaataccggtaatcttgtcgaggaggacatatagtattcttgtattctaccgaatacccgagagatgcgatacaaaagagcaagactaatttgtaaaccatcttactcaaaatatgtaacaatagtacgatgcaatgagtaagacaataggaaatctatcttatatacacataattattctatcaattttaccaattagttagtgtaatgttaacaaaaatgtgggagaatctaattagtttttctttacacaattgacgtacatgagtctgagttccttgtttttgctaattatttcatccaatttattattcttgacgatatcgagatcttttgtataggagtcaaacttgtattcaacatgcttttctataatcattttagctatttcggcatcatccaatagtacattttccagattagcagaatagatattaatgtcgtatttgaacagagcctgtaacatctcaatgtctttattatctatagccaatttaatgtccggaatgaagagaagggaattattggtgtttgtcgacgtcatatagtcgagcaagagaatcatcatatccacgtgtccattttttatagtgatgtgaatacaactaaggagaatagccagatcaaaagtagatggtatctctgaaagaaagtaggaaacaatacttacatcattaagcatgacggcatgataaaatgaagttttccatccagttttcccatagaacatcagtctccaatttttcttaacaaacagttttaccgtttgcatgttaccactatcaaccgcataatacaatgcggtgtttcccttgtcatcaaattgtgaatcatccagtccactgaatagcaaaatctttactattttggtatcttccaatgtggctgcctgatgtaatggaaattcattctctagaagatttttcaatgctccagcgttcaacaacgtacatactagacgcacgttattatcagctattgcataatacaaggcactatgtccatggacatccgccttaaatgtatctttactagagagaaagcttttcagctgcttagacttccaagtattaattcgtgacagatccatgtctgaaacgagacgctaattagtgtatattttttcattttttataattttgtcatattgcaccagaattaataatatctttaatagatctgattagtagatacatggctatcgcaaaacaacatatacacatttaataaaaataatatttattaagaaaattcagatttcacgtacccatcaatataaataaaataatgattccttacaccgtacccatattaaggagattccaccttacccataaacaatataaatccagtaatatcatgtctgatgatgaacacaaatggtgtattaaattccagtttttcaggagatgatctcgccgtagctaccataatagtagatgcctctgctacagttccttgttcgtcgacatctatctttgcattctgaaacattttataaatatataatgggtccctagtcatatgtttaaacgacgcattatctggattaaacatactaggagccatcatttcggctatcgacttaatatccctcttattttcgatagaaaatttagggagtttaagattgtacactttattccctaattgagacgaccaatagtctaattttgcagccgtgatagaatctgtgaaatgggtcatattatcacctattgccaggtacatactaatattagcatccttatacggaaggcgtaccatgtcatattctttgtcatcgattgtgattgtatttccttgcaatttagtaactacgttcatcatgggaaccgttttcgtaccgtacttattagtaaaactagcattgcgtgttttagtgatatcaaacggatattgccatatacctttaaaatatatagtattaatgattgcccatagagtattattgtcgagcatattagaatctactacattagacataccggatctacgttctactatagaattaattttattaaccgcatctcgtctaaagtttaatctatataggccgaatctatgatattgttgataatacgacggtttaatgcacacagtattatctacgaaactttgataagttagatcagtgtacgtatatttagatgttttcagcttagctaatcctgatattaattctgtaaatgctggacccagatctctttttctcaaatccatagtcttcaataattctattctagtattacctgatgcaggcaatagcgacataaacatagaaaacgaataaccaaacggtgagaagacaatattatcatcttgaatatttttatacgctactataccggcattggtaaatccttgtagacgataggcggacgctgaacacgctaacgatagtatcaataacgcaatcatgattttatggtattaataattaaccttatttttatgttcggtataaaaaaattattgatgtctacacatccttttgtaattgacatctatatatccttttgtataatcaactctaatcactttaacttttacagttttccctaccagtttatccctatattcaacatatctatccatatgcatcttaacactctctgccaagatagcttcagagtgaggatagtcaaaaagataaatatatagagcataatcattctcgtatactctgccctttattacatcacccgcattgggcaacgaataacaaaatgcaagcatcttgttaacgggctcgtaaattgggataaaaattatgtttttattgtcttatatctattttattcaagagaatattcaggaatttctttttccggttgtatctcgtcgcagtatatatcatttgtacattgtttcatattttttaatagtttacaccttttagtaggactagtatcgtacaattcatagctgtattttgaattccaatcacgcataaaaatatcttccaattgttgacgaagacctaatccatcatccggtgtaatattaatagatgctccacatgtatccgtaaagtaatttcctgtccaatttgaggtacctatataggccgttttatcggttaccatatatttggcatggtttaccctagaatacggaatgggaggatcagcatctggtacaataaatagctttacttctatatttatgtttttagattttagcatagcgatagatcttaaaaagtttctcatgataaacgaagatcgttgccagcaactaatcaatagcttaacggatacttgtctgtctatagcggatcttcttaattcatcttctatataaggccaaaacaaaattttacccgccttcgaataaataatagggataaagttcataacagatacataaacgaatttactcgcatttctaatacatgacaataaagcggttaaatcattggttctttccatagtacatagttgttgcggtgcagaagcaataaatacagagtgtggaacgccgcttacgttaatactaagaggatgatctgtattataatacgacggataaaagtttttccaattatatggtagattgttaactccaagataccagtatacctcaaaaatttgagtgagatccgctgccaagttcctattattgaagatcgcaatacccaattccttgacctgagttagtgatctccaatccatgttagcgcttcctaaataaatatgtgtattatcagatatccaaaattttgtatgaagaactcctcctaggatatttgtaatatctatgtatcgtacttcaactccggccatttgtagtctttcaacatcctttaatggtttgttagatttattaacggctactctaactcgtactcctcttttgggtaattgtacaatctcgtttaatattatcgtgccgaaattcgtacccacttcatccgataaactccaataaaaagatgatatatctagtgtttttgtggtattggatagaatttccctccacatgttaaatgtagacaaatatactttatcaaattgcatacctataggaatagtttctgtaatcactgcgattgtattatccggattcattttatttgttaaaagaataatcctatatcacttcactctattaaaaatccaagtttctatttctttcatgactgattttttaacttcatccgtttccttatgaagatgatgtttggcaccttcataaatttttatttctctattacaatttgcatgttgcatgaaataatatgcacctaaaacatcgctaatcttattgtttgttccctggagtatgagagtcggggggtgttaatcttggaaattatttttctaaccttgttggtagccttcaagacctgactagcaaatccagccttaattttttcatgattgactaatgggtcgtattggtatttataaactttatccatatctctagatactgattctggacatagctttccgactggcgcatttggtgtgatggttcccataagtttggcagctagcagattcagtcttgaaacagcatctgcattaactagaggagacattagaatcattgctgtaaacaagtttggattatcgtaagaggctagctcccatggaatgacccaataagtagatttaatagttaccacgtgctgtaccaaagtcatcaatcatcattttttcaccattacttcttccatgtccaatatgatcatgtgagaatactaaaattcctaacgatgatatgttttcagctagttcgtcataacgtccagaatgtttaccagctccatgacttatgaatactaatgccttaggatatgtaataggtttccaatatttacaatatatgtaatcattgtccagattgaacatacagtttgcactcatgattcacgttatataactatcaatattaacagttcgtttgatgatcatattatttttatgttttattgataattgtaaaaacatacaattaaatcaatatagaggaaggagacggctactgtcttttgtaagatagtcatggcgactaaattagattatgaggatgctgttttttactttgtggatgatgataaaatatgtagtcgcgactccatcatcgatctaatagatgaatatattacgtggagaaatcatgttatagtgtttaacaaagatattaccagttgtggaagactgtacaaggaattgatgaagttcgatgatgtcgctatacggtactatggtattgataaaattaatgagattgtcgaagctatgagcgaaggagaccactacatcaattttacaaaagtccatgatcaggaaagtttattcgctaccataggaatatgtgctaaaatcactgaacattggggatacaaaaagatttcagaatctagattccaatcattgggaaacattacagatttgatgaccgacgataatataaacatcttgatactttttctagaaaaaaaattgaattgatgatataggggtcttcataacgcataattattacgttagcattctatatccgtgttaaaaaaaattatcctatcatgtatttgagagttttatatgtagcaaacatgatagctgtgatgccaataagctttagatattcacgcgtgctagtgttagggatggtattatctggtggtgaaatgtccgttatataatctacaaaacaatcatcgcatatagtatgcgatagtagagtaaacatttttatagtttttactggattcatacatcgtctacccaattcggttataaatgaaattgtcgccaatcttacacccaaccccttgttatccattagcatagtattaacttcgttatttatgtcataaactgtaaatgattttgtagatgccatatcatacatgatattcatgtccctattataatcattactaactttatcacaatatatgttgataatatctatatatgatctagtctttgtgggcaactgtctatacaagtcgtctaaacgttgtttactcatatagtatcgaacagccatcattacatggtcccgttccgttgatagataatcgagtatgttagtggacttgtcaaatctatataccatattttctggaagtggatatacatagtcgtgatcaacattattgctagcctcatcttctatatcctgtactataccattatctatatcatctacataatctatgatattattacacataaacatcgacaacatactattgtttattatctaagtcctgttgatccaaacccttgatctcctctatttgtactatctagagattgtacttcttccagttctggataatatatacgttgatagattagctgagctattctatctccagtatttacattaaacgtacattttccattattaataagaatgactcctatgtttcccctataatcttcgtctattacaccacctcctatatcaatgccttttagtgacagaccagacctaggagctattctaccatagcagaacttaggcatggacatactaatatctgtcttaattaactgtctttctcctggagggatagtataatcgtaagcgctatacaaatcatatccggcagcacccggcgattgcctagtaggagatttagctctgttagtttccttaacaaatctaactggtgagttaatattcatgttgaacataaaactaatattttatttcaaaattatttaccatcccatatattccatgaataagtgtgatgattgtacacttctatagtatctatatacgatccacgataaaatcctcctatcaatagcagtttattatccactatgatcaattctggattatccctcggataaataggatcatctatcagagtccatgtattgctggattcacaataaaattccgcatttctaccaaccaagaataaccttctaccgaacactaacgcgcatgatttataatgaggataataagtggatggtccaaactgccactgatcatgattgggtagcaaatattctgtagttgtatcagtttcagaatgtcctcccattacgtatataacattgtttatggatgccactgctggattacatctaggtttcagaagactcggcatattaacccaagcagcatccccgtggaaccaacgctcaacagatgtgggatttggtagacctcctactacgtataatttattgttagcgggtatcccgctagcatacagtctggggctattcatcggaggaattggaatccaattgtttgatatataatttacagctatagcattgttatgtatttcattgttcatccatccaccgatgagatatactacttctccaacatgagtacttgtacacatatggaatatatctataatttgatccatgttcataggatactctatgaatggatacttgtatgatttgcgtggttgtttatcacaatgaaatattttggtacagtctagtatccattttacattatttatacctctgggagaaagataatttgacctgattacatttttgataaggagtagcagatttcctaatttatttcttcgcctcatataccacttaatgacaaaatcaactacataatcctcatctggaacatttagttcatcgctttctagaataagtttcatagatagataatcaaaattgtctatgatgtcatcttccagttccaaaaagtgtttggcaataaagtttttagtatgacataagagattggatagtccgtattctatacccatcatgtaacactcgacacaatattcctttctaaaatctcgtaagataaagtttatacaagtgtagatgataaattctacagaggttaatatagaagcacgtaataaattgacgacgttatgactatctatatatacctttccagtatatgagtaaataactatagaagttaaactgtgaatgtcaaggtctagacaaacccttgtaactggatctttatttttcgtgtatttttgacgtaaatgtgtgcgaaagtaaggagataactttttcaatatcgtagaattgactattatattgcctcctatggcatcaataattgttttgaatttcttagtcatagacaatgctaatatattcttacagtacacagtattgacaaatatcggcatttatgtttctttaaaagtcaacatctagagaaaaatgattatctttttgagacataactcccattttttggtattcacccacacgtttttcgaaaaaattagtttttccttccaatgatatattttccatgaaatcaaacggattggtaacattataaatttttttaaatcccaattcagaaatcaatctatccgcgacgaattctatatatgttttcatcatttcacaattcattcctataagtttaactggaagagccgcagtaagaaattcttgttcaatggatactgcatctgttataatagatctaacggtttcttcactcggtggatgcaataaatgtttaaacatcaaacatgcgaaatcgcagtgcagaccctcgtctctactaattagttcgttggaaaacgtgagtccgggcattaggccacgctttttaagccaaaatatggaagcgaatgatccagaaaagaaaattccttctactgcagcaaaggcaataagtctctctccataaccggcgctgtcatgtatccacttttgagcccaatcggccttcttttttacacaaggcatcgtttctatggcattaaagagatagtttttttcattactatctttaacataagtatcgatcaaaagactatacatttccgaatgaatgttttcaatggccatctgaaatccgtagaaacatctagcctcggtaatctgtacttctgtacaaaatcgttccgccaaattttcattcactattccgtcactggctgcaaaaaacgccaatacatgttttataaaatatttttcgtctggtgttagtttattccaatcattgatatctttagatatatctacttcttccactgtccaaaatgatgcctctgcctttttatacatgttccagatgtcatgatattggattgggaaaataacaaatctatttggatttggtgcaaggatgggttccataactaaattaacaataacaataaattttttttcagttatctatatgcctgtacttggattttttgtacatcgatatcgccgcaatcactacaataattacaagtattattgatagcattgttattagtactatcataattaaattatctacattcatgggtgctgaataatcgttattatcatcattatcattttgtaattgtgacatcatactagataaatcgtttgcgagattgttgtgggaagcgggcatggaggatgcattatcattattatttaacgccttccatttggattcacaaatgttacgcacattcaacattttatggaaactataattttgtgaaaacaaataacaagaaaactcgtcatcgttcaaatttttaacgatagtaaaccgattaaacgtcgagctaatttctaacgctagcgactctgttggatatgggtttccagatatatatcttttcagttcccctacgtatctataatcatctgtaggaaatggaagatatttccatttatctactgttcctaatatcatatgtggtggtgtagtagaaccattaagcgcgaaagatgttatttcgcatcgtattttaacttcgcaataatttctggttagataacgcactctaccagtcaagtcaatgatattagcctttacagatatattcatagtagtcgtaacgatgactccatcttttagatgcgatactcctttgtatgtaccagaatcttcgtacctcaaactcgatatatttaaacaagttaatgagatattaacgcgttttatgaatgatgatatataaccagaagttttatcctcggtggctagcgctataaccttatcattataataccaactagtgtgattaatatgtgacacgtcagtgtgggtacaaatatgtacattatcgtctacgtcgtattcgatacatccgcatacagccaacaaatataaaatgacaaatactctaacgccgttcgtacccatcttgatgcggtttaataaatgttttgatttcaatttattgtaaaaaaagattcggttttatactgttcgatattctcattgcttatattttcatctatcatctccacacagtcaaatccgtggttagcatgcacctcatcaaccggtaaaagactatcggactcttctatcattataactctagaatatttaatttggtcattattaatcaagtcaattatcttatttttaacaaacgtgagtattttactcattttttataaaaacttttagaaatatacagactctatcgtgtgtctatatcttctttttatatccaatgtatttatgtctgatttttcttcatttatcatatataatggtccaaattctacacgtgcttcggattcatccagatcattaaggttcttataattgtaacatccttctcttccctcttctacatcttccttcttattcttattcttagcgtcacagaatctaccacagcaggatcccatgacgagcgtcatattaaactaatccattttcaattataatatatgattagtaatgaccattaaaataaaaaatattcttcataaccggcaagaaagtgaaaagttcacattgaaactatgtcagtagtatacatcatgaaatgatgatatatatatactctattttggtggaggattatatgatataattcgtggataatcatttttaagacacatttctttattcgtaaatcttttcacgttaaatgagtgtccatattttgcaatttcttcatatgatggcggtgtacgtggacgaggctgctcctgttcttgttgtggtcgccgactgtcgtgtctgcgtttagatccctccattatcgcgattgcgtagatggagtactattttataccttgtaattaaatttttttattaattaaacgtataaaaacgttccgtatctgtatttaagagccagatttcgtctaatagaacaaatagctacagtaaaaataactagaataattgctacacccactagaaaccacggatcgtaatacggcaatcggttttcgataataggtggaacgtatattttatttaaggacttaacaattgtctgtaaaccacaatttgcttccgcggatcctgtattaactatctgtaaaagcatatgttgaccgggcggagccgaacattctccgatatctaatttctgtatatctataatattattaacctccgcatacgcattacagttcttttctagcttggataccgcactaggtacatcgtctagatctattcctatttcctcagcgatagctcttctatccttttccggaagcaatgaaatcacttcaataaatgattcaaccatgagtgtgaaactaagtcgagaattactcatgcatttgttagttattcggagcgcgcaatttttaaactgtcctataacctctcctatatgaatagcacaagtgacattagtagggatagaatgttgagctaatttttgtaaataactatctataaaaagattatacaaagttttaaactctttagtttccgccatttatccagtctgagaaaatgtctctcataataaatttttccaagaaactaattgggtgaagaatggaaacctttaatctatatttatcacagtctgttttggtacacatgatgaattcttccaatgccgtactaaattcgatatctttttcgatttctggatatgtttttaataaagtatgaacaaagaaatggaaatcgtaataccagttatgtttaactttgaaattgttttttattttcttgttaatgattccagccacttgggaaaagtcaaagtcgtttaatgccgatttaatacgttcattaaaaacaaactttttatcctttagatgaattattattggttcattggaatcaaaaagtaagatattatcgggtttaagatctgcgtgtaaaaagttgtcgcaacagggtagttcgtagattttaatgtataacagagccatctgtaaaaagataaactttatgtattgtaccaaagatttaaatcctaatttgatagctaactcggtatctactttatctgccgaatacagtgctaggggaaaaattataatgtttcctctttcatattcgtagttagttctcttttcatgttcgaaaaagtgaaacatgcggttaaaatagtttataacattaatattactgttaataactgccggataaaagtgggatagtaatttcacgaatttgatactgtcctttctctcgttaaacgcctttaaaaaaactttagaagaatatctcaatgagagttcctgaccatccatagtttgtatcaataatagcaacatatgaagaacacgtttatacagagtatgtaaaaatgttaatttatagtttaatcccatggcccacgcacacacgattaattttttttcatctccctttagattgttgtatagaaatttgggtactgtgaactccgccgtagtttccatgggactatataattttgtggcctcgaatacaaattttactacatagttatctatcttaaagactataccatatcctcctgtagatatgtgataaaaatcgtcgtttataggataaaatcgtttatccttttgttggaaaaaggatgaattaatgtaatcattctcttctatctttagtagtgtttccttattaaaattcttaaaataatttaacaatctaactgacggagcccaattttggtgtaaatctaattgggacattatattgttaaaatacaaacagtctcctaatataacagtatctgataatctatggggagacatccattgatattcaggggatgaatcattggcaacacccatttattgtacaaaaagccccaatttacaaacgaaagtccaggtttgatagagacaaacaattaactattttgtctctgtttttaacacctccacagtttttaatttctttagtaatgaaattattcacaatatcagtatcttctttatctaccagagattttactaacttgataaccttggctgtctcattcaatagggtagtaatatttgtatgtgtgatattgatatctttttgaattgtttcttttagaagtgattctttgatggtgccagcatacgaattacaataatgcagaaactcggttaacatgcaggaattatagtaagccaattccaattgttgcctgtgttgtattagagtgtcaatatgagcaatggtgtccttgcgtttctctgatagaatgcgagcagcgattttggcgttatcatttgacgatatttctggaatgacgaatcctgtttctactaactttttggtaggacaaagtgaaacaatcaagaagatagcttctcctcctatttgtggaagaaattgaactcctctagatgatctactgacgatagtatctccttgacagatattggaccgaattacagaagtacctggaatgtaaagccctgaaaccccctcattttttaagcagattgttgccgtaaatcctgcactatgcccaagatagagagctcctttggtgaatccatctctatgtttcagtttaaccaagaaacagtcagctggtctaaaatttccatctctatctaatacagcatctaacttgatgtcaggaactatgaccggtttaatgttatatgtaacattgagtaaatccttaagttcataatcatcactgtcatcagttatgtacgatccaaacaatgtttctaccggcatagtggatacgaagatgctatccatcagaatgtttccctgattagtattttctatatagctattcttctttaaacgattttccaaatcagtaactatgttcatttttttaggagtaggacgcctagccagtatggaagaggattttctagatcctctcttcaacatctttgatctcgatggaatgcaaaaccccatagtgaaacaaccaacgataaaaataatattgtttttcactttttataattttaccatctgactcatggattcattaatatctttataagagctactaacgtataattctttataactgaactgagatatatacaccggatctatggtttccataattgagtaaatgaatgctcggcaataactaatggcaaatgtatagaacaacgaaattatactagagttgttaaagttaatattttctatgagctgttccaataaattatttgttgtgactgcgttcaagtcataaatcatcttgatactatccagtaaaccgtttttaagttctggaatattatcatcccattgtaaagcccctaattcgactatcgaatatcctgctctgatagcagtttcaatatcgacggacgtcaatactgtaataaaggtggtagtattgtcatcatcgtgataaactacgggaatatggtcgttagtaggtacggtaactttacacaacgcgatatataactttccttttgtaccatttttaacgtagttgggacgtcctgcagggtattgttttgaagaaatgatatcgagaacagatttgatacgatatttgttggattcctgattattcactataatataatctagacagatagatgattcgataaatagagaaggtatatcgttggtaggataatacatccccattccagtattctcggatactctattgatgacactagttaagaacatgtcttctattctagaaaacgaaaacatcctacatggactcattaaaacttctaacgctcctgattgtgtctcgaatgcctcgtacaaggatttcaaggatgccatagattctttgaccaacgatttagaattgcgtttagcatctgatttttttattaaatcgaatggtcggctctctggtttgctaccccaatgataacaatagtcttgtaaagataaaccgcaagaaaatttatacgcatccatccaaataaccctagcaccatcggatgatattaatgtattattatagattttccatccacaattattgggccagtatactgttagcaacggtatatcgaatagattactcatgtaacctactagaatgatagttcgtgtactagtcataatatctttaatccaatctaaaaaatttaaaattagattttttacactgttaaagttaacaaaagtattacccgggtacgtggatatcatatatggcattggtccattatcagtaatagctccataaactgatacggcgatggtttttatatgtgtttgatctaacgaggaagaaattcgcgcccacaattcatctctagatatgtatttaatatcaaacggtaacacatcaatttcgggacgcgtatatgtttctaaatttttaatccaaatataatgatgacctatatgccctattatcatactgtcaactatagtacacctagggaacttacgatacatctgtttcctataatcgttaaattttacaaatctataacatgctaaaccttttgacgacagccattcattaatttctgatatggaatctgtattctcgataccgtatcgttctaaagccagtgctatatctccctgttcgtgggaacgctttcgtataatatcgatcaacggataatctgaagtttttggagaataatatgactcatgatctatttcgtccataaacaatctagacataggaattggaggcgatgatcttaattttgtgcaatgagtcgtcaatcctataacttctaatcttgtaatattcatcatcgacataatactatctatgttatcatcgtatattagtataccatgaccttcttcatttcgtgccaaaatgatatacagtcttaaatagttacgcaatatctcaatagtttcataattgttagctgttttcatcaaggtttgtatcctgtttaacatgatggcgttctataacgtctctattttctatttttaattttttaaatttttaacgatttactgtggctagatacccaatctctctcaaatatttttttagcctcgcttacaagctgtttatctatactattaaaactgacgaatccgtgattttggtaatgggttccgtcgaaatttgccgaagtgatatgaacatattcgtcgtcgactatcaacaattttgtattattctgaatagtgaaaaccttcacagatagatcattttgaacacacaacgcatctagacttttggcggttgccatagaatatacgtcgttcttatcccaattaccaactagaagtctgatcttaactcctctattaatggctgcttctataatggagttgtaaatgtcgggccaatagtagctattaccgtcgacacgtgtagtgggaactatggccaaatgttcaatatctatactagtcttagctgacctgagtttatcaataactacatcggtatctagatctctagaatatcccaataggtgttccggagaatcagtaaagaacactccacctataggattcttaatatgatacgcagtgctaactggcaaacaacaagccgcagagcataaattcaaccatgaattttttgcgctattaaaggctttaaaagtatcaaatcttctacgaagatctgtggccagcgggggataatcagaatatacacctaacgttttaatcgtatgtatagatcctccagtaaatgacgcgtttcctacataacatctttcatcatctgacacccaaaaacaaccgagtagtagtcccacattattttttttatctatattaacggttataaaatttatatccgggcagtgactttgtagctctcccagatttcttttccctcgttcatctagcaaaactattattttaatccctttttcagatgcctcttttagtttatcaaaaataagcgctcccctagtcgtactcagaggattacaacaaaaagatgctatgtatatatatttcttagctagagtgataatttcgttaaaacattcaaatgttgttaaatgatcggatctaaaatccatattttctggtagtgtttctaccagcctacattttgctcccgcaggtaccgatgcaaatggccacatttagttaacataaaaacttatacatcctgttctatcaacgattctagaatatcatcggctatatcgctaaaattttcatcaaagtcgacatcacaacctaactcagtcaatatattaagaagttccatgatgtcatcttcgtctatttctatatccgtatccattgtagattgttgaccgattatcgagtttaaatcattactaatactcaatccttcagaatacaatctgtgtttcattgtaaatttataggcggtgtatttaagttggtagattttcaattatgtattaatatagcaacagtagttcttgctcctccttgattctagcatcctcttcattattttcttctacgtacataaacatgtccaatacgttagacaacacaccgacgatggcggccgcaggatcctgcgaagcttacagacacgaatatgactaaaccgatgaccatttaaaaacccctctctagctttcacttaaactgtatcgatcattcttttagcacatgtataatataaaaacattattctatttcgaatttaggcttccaaaaatttttcatccgtaaaccgataataatatatatagacttgttaatagtcggaataaatagattaatgcttaaactatcatcatctccacgattagagatacaatatttacattctttttgctgtttcgaaactttatcaatacacgttaatacaaacccaggaaggagatattgaaactgaggctgttgaaaatgaaacggtgaatacaataattcagataatgtaaaatcatgattccgtattctgatgatattagaactgctaatggatgtcgatggtatgtatctaggagtatctattttaacaaagcatcgatttgctaatatacaattatccttttgattaattgttattttattcatattcttaaaaggtttcatatttatcaattcttctacattaaaaatttccatttttaatttatgtagccccgcaatactcctcattacgtttcattttttgtctataatatccattttgttcatctcggtacatagattatccaattgagaagcgcatttagtagttttgtacattttaagtttattgacgaatcgtcgaaaactagttatagttaacattttattatttgataccctgatattaatacccctgccgttactattatttataactgatgtaatccacgtaacattggaattaactatcgatagtaatgcatcgacgcttccaaaattgtctattataaactcaccgataatttttttattgcatgttttcatattcattaggattatcaaatctttaatcttattacgattgtatgcgttgatattacaagacgtcattctaaaagacggaggatctccatcaaatgccagacaatcacgtacaaagtacatggaaataggttttgttctattgcgcatcatagatttatatagaacacccgtagaaatactaatttgttttactctataaaatactaatgcatctatttcatcgttttgtataacgtctttccaagtgtcaaattccaaatttttttcattgatagtaccaaattcttctatctctttaactacttgcatagataggtaattacagtgatgcctacatgccgttttttgaaactgaatagatgcgtctagaagcgatgctacgctagtcacaatcaccactttcatatttagaatatatatatgtaaaaatatagtagaatttcattttgtttttttctatgctataaatgaattctcattttgcatctgctcatactccgttttatattaataccaaagaaggaagatatctggttctaaaagccgttaaagtatgcgatgttagaactgtagaatgcgaaggaagtaaagcttcctgcgtactcaaagtagataaaccctcatcgcccgcgtgtgagagaagaccttcgtccccgtccagatgcgagagaatgaataaccctggaaaacaagttccgtttatgaggacggacatgctacaaaatatgttcgcggctaatcgcgataatgtagcttctagacttttgtcctaaaatactattatatccttttcgatattaataaatccgtgtcgtccaggttttttatctctttcagtatgtgaatagataggtattttatctctattcatcatcgaatttaagagatccgataaacattgtttgtattctccagatgtcagcatctgatacaacaatatatgtgcacataaacctctggcacttatttcatgtaccttccccttatcactaaggagaatagtatttgagaaatatgtatacatgatattatcatgaattagatatacagaatttgtaacactctcgaaatcacacgatgtgtcggcgttaagatctaatatatcactcgataacacattttcatctagatacactagacattttttaaagctaaaatagtctttagtagtaacagtaactatgcgattattttcatcgatgatacatttcatcggcatattattacgcttaccatcaaagactataccatgtgtatatctaacgtattctagcatggttgccatacgcgcattaaacttttcaggatctttggatagatcttccaatctatctatttgagaaaacatttttatcatgttcaatagttgaaacgtcggatccactatatagatattatctataaagattttaggaactacgttcatggtatcctggcgaatattaaaactatcaatgatatgattatcgttttcatcttttatcaccatatagtttctaagatatgggattttacttaatataatattatttcccgtgataaattttattagaaaggccaaatctataagaaaagtcctagaattagtctgaagaatatctatatcgccgtatagtatatttggattaattagatatagagaatatgatccgtaacatatacaacttttattatggcgtctaagatattcttccatcaacttattaacatttttgactagggaagatacattatgacgtcccattacttttgccttgtctattactgcgacgttcatagaatttagcatatctcttgccaattcttccattgatgttacattataagaaattttagatgaaattacatttggagctttaatagtaagaactcctaatatgtccgtgtatgtggtcactaatacagattgtagttctataatcgtaaataatttacctatattatatgtttgagtctgtttagaaaagtagctaagtatacgatcttttatttctgatgcagatgtattaacatcggaaaaaaatctttttttattcttttttactaaagatacaaatatgtctttgttaaaaacagttattttctgaatatttctagcttgtaattttaacatatgatattcgttcacactaggtactctgcctaaataggtttctataatctttaatgtaatattaggaaaagtattctgatcaggattcctattcattttgaggatttaaaactctgattattgtctaatatggtctctacgcaaactttttcacagagcgatagagtttttgataactcgtttttcttaagaaatataaaactactgtctccagagctcgctctatcttttattttatctaattcgatacaaactcctgatactggttcagaaagtaattcattaattttcagtcctttatagaagatatttaatatagataatacaaaatcttcagtttttgatatcgatctgattgatcctagaactagatatattaataacgtgctcattaggcagtttatggcagcttgataattagatatagtatattccagttcatatttattagataccgcattgcccagattttgatattctatgaattcctctgaaaataaatccaaaataactagacattctattttttgtggattagtgtactctcttccctctatcatgttcactactggtgtccacgatgataaatatctagagggaatataatatagtccataggatgccaatctagcaatgtcgaataactgtaattttattcttcgctcttcattatgaattgattcttgaggtataaacctaacacaaattatattattagacttttcgtatgtaatgtctttcatgttataagtttttaatcctggaatagaatctattttaatgaggcttttaaacgcagagttctccaacgagtcaaagcataatactctgttgtttttcttatatacgatgttacgattttcttctttgaatggaataggtttttgaattagtttataattacaacataatagataaggaagtgtgcaaatagtacgcggaaaaaacataatagctcccctgttttcatccatggttttaagtaaatgatcactggcttctttagtcaatggatattcgaacattaaccgtttcatcatcattggacagaatccatatttcttaatgtaaagagtgatcaaatcattgtgtttattgtaccatcttgttgtaaatgtgtattcggttatcggatctgctcctttttctattaaagtatcgatgtcaatctcgtctaagaattcaactatatcgacatatttcatttgtatacacataaccattactaacgtagaatgtataggaagagatgtaacgggaacagggtttgttgattcgcaaactattctaatacataattcttctgttaatacgtcttgcacgtaatctattatagatgccaagatatctatataattattttgtaagatgatgttaactatgtgatctatataagtagtgtaataattcatgtattttgatatatgttccaactctgtctttgtgatgtctagtttcgtaatatctatagcatcctcaaaaaatatattcgcatatattcccaagtcttcagttctatcttctaaaaaatcttcaacgtatggaatataataatctattttacctcttctgatatcattaatgatatagtttttgacactatcttctgtcaattgattcttattcactatatctaagaaacggatagcgtccctaggacgaactactgccattaatatctctattatagcttctggacataattcatctattataccagaattaatgggaactattccgtatctatctaacatagttttaagaaagtcagaatctaagacttgatgttcatatattggttcatacatgaaatgatctctattgatgatagtgactatttcattctctgaaaattggtaactcattctatatatgctttccttgttgatgaaggatagaatatactcaatagaatttgtaccaacaaactgttctcttatgaatcgtatatcatcatctgaaataatcatgtaaggcatacatttaacaattagagacttgtctcctgttatcaatatactattcttgtgataatttatgtgtgaggcaaatttgtccacgttctttaattttgttatagtagatatcaaatccaatggagctacagttcttggcttaaacagatatagtttttctggaacaaattctacaacattattataaaggactttgggtagataagtgggatgaaatcctattttaattaatgcgatagccttgtcctcgtgcagatatccaaacgcttttgtgatagtatggcattcattgtctagaaacgctctacgaatatctgtgacagatatcatctttagagaatatactagtcgcgttaatagtactacaatttgtattttttaatctatctcaataaaaaaattaatatgtatgattcaatgtataactaaactactaactgttattgataactagaatcagaatctaatgatgacgtaaccaagaagtttatctactgccaatttagctgcattatttttagcatctcgtttagattttccatcggccttatcgaatactcttccgtcgatgtctacacaggcataaaatgtaggagagttactaggcccaactgattcaatacgaaaagaccaatctctcctagtaatttggcagtactcattaataacggtgacagggttagcatctttccaatcaataatttttttagccggaataacatcatcaaaagacttatgatcctctctcattgatttttcgcgggatacatcatctattatgacgtcagccatagcatcagcatccggcttatccgcctccgttgtcataaaccaacgaggaggaatatcgtcggagctgtacaccatagcactacgttgaagatcgtacagagctttattaacttctcgcttctccatattaagttgtctagttagttgtgcagcagtagctccttcgattccaatgtttttaatagccgcacacacaatctctgcgtcagaacgctcgtcaatatagatcttagacatttttagagagaactaacgcaaccagcaataaaactgaacctactttatcatttttttattcatcatcctctggtggttcgtcgttcctatcaaatgtagctctgattaacccgtcatctataggtgatgctggttctggagattctggaggagatggattattatctggaagaatctctgttatttccttgttttcatgtatcgattgcgttgtaacattaagattgcgaaatgctctaaatttgggaggcttaaagtgttgtttgcaatctctacacgcgtgtctaactagtggaggttcgtcagctgctctagtttgaatcatcatcggcgtagtattcctacttttacagttaggacacggtgtattgtatttctcgtcgagaacgttaaaataatcgttgtaactcacatcctttattttatctatattgtattctactcctttcttaatgcattttataccgaataagagatagcgaaggaattctttttcggtgccgctagtacccttaatcatatcacatagtgttttatattccaaatttgtggcaatagacggtttatttctatacgatagtttgtttctggaatcctttgagtattctataccaatattattctttgattcgaatttagtttcttcgatattagattttgtattacctatattcttgatgtagtactttgatgatttttccatggcccattctattaagtcttccaagttggcatcatccacatattgtgatagtaattctcggatatcagtagcggctaccgccattgatgtttgttcattggatgagtaactactaatgtatacattttccatttataacacttatgtattaactttgttcatttatattttttcattattatgttgatattaacaaaagtgaatatatatatgttaataattgtattgtggttatacggctacaattttataatgagtgaaagtcagtgtccgatgatcaatgacgatagctttactctgaaaagaaagtatcaaatcgatagtgcggagtcaacaataaaaatggataagaagaggataaagtttcagaatagagccaaaatggtaaaagaaataaatcagacaataagagcagcacaaactcattacgagacattgaaactaggatacataaaatttaagagaatgattatgactactactctagaagatatagcaccatctattccaaataatcagaaaacttataaactattctcggacatttcagccatcggcaaagcatcacagaatccgagtaagatggtatatgctctgctgctttacatgtttcccaatttgtttggagatgatcatagattcattcgttatagaatgcatccaatgagtaaaatcaaacacaagatcttctctcctttcaaacttaatcttattagaatattagtggaagaaagattctataataatgaatgcagatctaataaatggagaataattggaacacaagttgataaaatgttgatagctgaatctgataaatatacaatagatgcaaggtataacctaaaacccatgtatagaatcaagggagaatctgaagaagataccctctttatcaaacagatggtagaacaatgtgtgacatcccaggaattggtggaaaaagtgttgaagatactgtttagagatttgttcaagagtggagaatacaaagcgtacagatacgatgatgatgtagaaaatggatttattggattggatacactaaaattaaacattgttcatgatatagttgaaccatgtatgcctgttcgtaggccagtggctaagatactgtgtaaagaaatggtaaataaatactttgagaatccgctacatattattggtaaaaatcttcaagagtgcattgactttgttagtgaataggcatttcatctttctccaatactaattcaaattgttaaattaataatggatagtataaatagttattagttataagatagtaaaaataattattagaataagagtgtagtatcatagataactctcttctataaaaatggattttattcgtagaaagtatcttatatacacagtagaaaataatatagattttttaaaggatgatacattaagtaaagtaaacaattttaccctcaatcatgtactagctctcaagtatctagttagcaattttcctcaacacgttattactaaggatgtattagctaataccaatttttttgttttcatacatatggtacgatgttgtaaagtgtacgaagcggttttacgacacgcatttgatgcacccacgttgtacgttaaagcattgactaagaattatttatcgtttagtaacgcaatacaatcgtacaaggaaaccgtgcataaactaacacaagatgaaaaatttttagaggttgccgaatacatggacgaattaggagaacttataggcgtaaattatgacttagttcttaatccattatttcacggaggggaacccatcaaagatatggaaatcatttttttaaaactgtttaagaaaacagacttcaaagttgttaaaaaattaagtgttataagattacttatttgggcatacctaagcaagaaagatacaggcatagagtttgcggataatgatagacaaaatatatacactctatttcaacaaactggtagaatcgtccatagcaatctaacagaaacgtttagagattatatctttcccggagataagactagctattgggtgtggttaaacgaaagtatagctaatgatgcggatatcgttcttaatagacacgccattaccatgtatgataaaattcttagttatatatactctgagataaaacaaggacgcgttaataaaaacatgcttaagttagtttatatctttgagcctgaaaaagatatcagagaacttctgctagaaatcatatatgatattcctggagatatcctatctattattgatgcaaaaaacgacgattggaaaaaatattttattagtttttataaagctaattttattaacggtaatacatttattagtgatagaacgtttaacgaggacttattcagagttgttgttcaaatagatcccgaatatttcgataatgaacgaattatgtctttattctctacgagtgctgcggacattaaacgatttgatgagttagatattaataacagttatatatctaatataatttatgaggtgaacgatatcacattagatacaatggatgatatgaagaagtgtcaaatctttaacgaggatacgtcgtattatgttaaggaatacaatacatacctgtttttgcacgagtcggatcccatggtcatagagaacggaatactaaagaaactgtcatctataaaatccaagagtagacggctgaacttgtttagcaaaaacattttaaaatattatttagacggacaattggctcgtctaggtcttgtgttagatgattataaaggagacttgttagttaaaatgataaaccatcttaagtctgtggaggatgtatccgcattcgttcgattttctacagataaaaaccctagtattcttccatcgctaatcaaaactattttagctagttataatatttccatcatcgtcttatttcaaaggtttttgagagataatctatatcatgtagaagaattcttggataaaagcatccatctaaccaagacggataagaaatatatacttcaattgataagacacggtagatcatagaacagaccaaatatattattaataatttgtatatacatagatataattatcacacatttttgataaatgggaactgctgcaacaattcagactcccaccaaattaatgaataaagaaaatgcagaaatgattttggaaaaaattgttgatcatatagttatgtatattagtgacgaatcaagtgattcagaaaataatcctgaatatattgattttcgtaacagatacgaagactatagatctctcattataaaaagtgatcacgagtttgtaaagctatgtaaaaatcatgcggagaaaagttctccagaaacgcaacaaatgattatcaaacacatatacgaacaatatcttattccagtatctgaagtactattaaaacctataatgtccatgggtgacataattacatataacggatgtaaagacaatgaatggatgctagaacaactctctaccctaaactttaacaatctccgcacatggaactcatgtagcataggcaatgtaacgcgtctgttttatacattttttagttatctgatgaaagataaactaaatatataagtataatcccattctaatactttaacctgatgtattagcatcttattagaatattaacctaactaaaagacataacataaaaactcattacatagttgataaaaagcggtaggatataaatattatggctgccaccgttccgcgttttgacgacgtgtacaaaaatgcacaaagaagaattctagatcaagaaacattttttagtagaggtctaagtagaccgttaatgaaaaacacatatctatttgataattacgcgtatggatggataccagaaactgcaatttggagtagtagatacgcaaacctagatgctagtgactattatcccatttcgttgggattacttaaaaagttcgagtttctcatgtctctatataaaggtcctattcccgtatatgaagaaaaagtaaatactgaattcatagccaatggatcgttctctggtagatacgtatcatatcttcgaaagttttctgcccttccaacaaacgagtttattagttttttgttactgacttccattccaatctataatatcttgttctggtttaaaaacacacagtttgatattactaaacacacattattcagatacgtctatacagataatgccaaacacctggcgttggctaggtatatgcatcaaacaggagactataagcctttgtttagtcgtctcaaagagaattatatatttaccggtcccgttccaataagtatcaaagatatagatcaccctaatcttagtagagcaagaagtccatccgattatgagacattagctaatattagtactatattgtactttaccaagtatgatccggtattaatgtttttattgttttacgtacctgggtattcaattactacaaaaattactccagccgtagaatatctaatggataaactgaatctaacaaagagcgacgtacaactgttgtaaattattttatgcttcgtaaaatgtaggttttgaaccaaacattctttcaaagaatgagatgcataaaactttattatccaatagattgactatttcggacgtcaatcgtttaaagtaaacttcgtaaaatattctttgatcactgccgagtttaaaacttctatcgataattgtctcatatgttttaatatttacaagttttttggtccatggtacattagccggacaaatatatgcaaaataatatcgttctccaagttctatagtttctggattatttttattatattcagtaactaaatacatattagggttatctgcggatttataatttgagtgatgcattctactcaacataaataattctagaggagacgatctactatcaaattcggatcgtaaatctgtttctaaagaacggagaatatctatacatacctgattagaattcatccgtccttcagacaacatctcagacagtctggttttgtacatcttaatcatattcttatgaaacttggaaacatctcttctagtttcactagtacctttattaattctctcaggtacagattttgaattcgacgatgctgagtatttcatcgttgtatatttcttcttcgattgcataatcagattcttatataccgcctcaaactctattttaaaattattaaacaatactctattattaatcagtcgttctaactctttcgctatttctatagacttatctacatcttgactgtctatctctgtaaacacggagtcggtatctccatacacgctacgaaaacgaaatctgtaatctataggcaacgatgttttcacaatcggattaatatctctatcgtccatataaaatggattacttaatggattggcaaaccgtaacataccgttagataactctgctccatttagtaccgattctagatacaagatcattctacgtcctatggatgtgcaactcttagccgaagcgtatgagtatagagcactatttctaaatcccatcagaccatatactgagttggctactatcttgtacgtatattgcatggaatcatagatggccttttcagttgaactggtagcctgttttagcatctttttatatctggctctctctgccaaaaatgttcttaatagtctaggaatggttccttctatcgatctatcgaaaattgctatttcagagatgaggttcggtagtctaggttcacaatgaaccgtaatatatctaggaggtggatatttctgaagcaatagctgattatttatttcttcttccaatctattggtactaacaacgacaccgactaatgtttccggagatagatttccaaagatacacacattaggatacagactgttataatcaaagattaatacattattactaaacattttttgttttggagcaaataccttaccgccttcataaggaaacttttgttttgtttctgatctaactaagatagttttagtttccaacaatagctttaacagtggacccttgatgactgtactcgctctatattcgaataccatggattgaggaagcacatatgttgacgcacccgcgtctgtttttgtttctactccataatactcccacaaatactgacacaaacaagcatcatgaatacagtatctagccatatctaaagctatgtttagattataatccttatacatctgagctaaatcaacgtcatcctttccgaaagataatttatatgtatcattaggtaaagtaggacataatagtacgactttaaatccattttcccaaatatctttacgaattactttacatataatatcctcatcaacagtcacataattacctgtggttaaaacctttgcaaatgcagcggctttgcctttcgcgtctgtagtatcgtcaccgatgaacgtcatttctctaactcctctatttaatactttacccatgcaactgaacgcgttcttggatatagaatccaatttgtacgaatccaatttttcaaatttttgaatgaatgaatatagatcgaaaaatatagttccattattgttattaacgtgaaacgtagtattggccatgccgcctactcccttatgactagactgatttctctcataaatacagagatgtacagcttcctttttgtccggagatctaaagataattttctctcctgttaataactctagacgattagtaatatatctcagatcaaagttatgtccgttaaaggtaacgacgtagtcgaacgttagttccaacaattgtttagctattcgtaacaaaactatttcagaacatagaactagttctcgttcgtaatccatttccattagtgactgtatcctcaaacatcctctatcgacggcttcttgtatttcctgttccgttaacatctcttcattaatgagcgtaaacaataatcgtttaccacttaaatcgatataacagtaacttgtatgcgagattgggttaataaatacagaaggaaacttcttatcgaagtgacactctatatctagaaataagtacgatcttgggatatcgaatctaggtatttttttagcgaaacagttacgtggatcgtcacaatgataacatccattgttaatctttgtcaaatattgctcgtccaacgagtaacatccgtctggagatatcccgttagaaatataaaaccaactaatattgagaaattcatccatggtggcattttgtatgctgcgtttctttggctcttctatcaaccacatatctgcgacggagcattttctatctttaatatctagattataacttattgtctcgtcaatgtctatagttctcatctttcccaacggcctcgcattaaatggaggaggagacaatgactgatatatttcgtccgtcactacgtaataaaagtaatgaggaaatcgtataaatacggtctcgccatttcgacatctggatttcagatataaaaatctgttttcaccgtgactttcaaaccaattaatgcaccgaacatccatttatagaatttagaaatatattttcatttaaatgaatcccaaacattggggaagagccgtatggaccattatttttatagtactttcgcaagcgggtttagacggcaacatagaagcgtgtaaacgaaaactatatactatagttagcactcttccatgtcctgcatgtagacggcacgcgactatcgctatagaggacaataatgtcatgtctagcgatgatctgaattatatttattattttttcatcagattatttaacaatttggcatctgatcccaaatacgcgatcgatgtgacaaaggttaaccctttataaacttaacccattataaaacttatgattagtcacaactgaaataaccgcgtgattattttttggtataattctacacggcatggtttctgtgactatgaattcaacccccgttacattagtgaaatctttaacaaacagcaagggttcgtcaaagacataaaactcattgtttacaatcgaaatagaccccctatcacacttaaaataaaaaatatccttatcctttaccaccaaataaaattctgattggtcaatgtgaatgtattcacttaacagttccacaaatttatttattaactccgaggcacatacatcgtcggtattttttatggcaaactttactcttccagcatccgtttctaaaaaaatattaacgagttccatttatatcatccaatattattgaaatgacgttgatggacagatgatacaaataagaaggtacggtacctttgtccaccatctcctccaattcatgctctattttgtcattaactttaatgtatgaaaacagtacgccacatgcttccatgacagtgtgtaacactttggatacaaaatgtttgacattagtataattgtccaagactgtcaatctataatagatagtagctataatatattctatgatggtattgaagaagatgacaaccttggcatattgatcatttaacacagacatggtatcaacagatagcttgaatgaaagagaatcagtaattggaataagcgtcttctcgatagagtgtccgtataccaacatgtctgatattttgatgtattccattaaattatttagttttttctttttattctcgttaaacagcatttctgtcaacggaccccaacatcgttgaccgattaagttttgattgatttttccgtgtaaggcgtatctagtcagatcgtatagcctatccaataatccatcgtctgtgtgtagatcacatcgtacactttttaattctctatagaagagcgacagacatctggagcaattacagacagcaatttctttattctctacagatgtaagatacttgaagacattcctatgatgatgcagaattttggataacacggtattgatggtatctgttaccataattcctttgatggctgatagtgtcagagcacaagatttccaatctttgacaatttttagcaccattatctttgttttgatatctatatcagacagcatggtgcgtctgacaacacagggattaagacggaaagatgaaatgattctctcaacatcttcaatagataccttgctattttttctggcattatctatatgtgcgagaatatcctctagagaatcagtatcctttttgatgatagtggatctcaatgacatgggacgtttaaaccttcttattctatcaccagattgcatggtgatttgtcttctttcttttatcataatgtaatctctaaattcatcggcaaattgtctatatctaaaatcataatatgagatgtttacctctacaaatatctgttcgtccaatgttagagtatttacatcagttttgtattccaaattaaacatggcaacggatttaattttatattcctctattaagtcctcgtcgataataacagaatgtagataatcatttaatccgtcgtacatggttggaagatgcttgttgacaaaatctttaattgtcttgatgaaggtgggactatatctaacatcttgattaataaaatttataacattgtccataggatactttgtaactagttttatacacatctcttcatcggtaagtttagacagaatatcgtgaacaggtggtatattatattcatcagatatacgaagaacaatgtccaaatctatattgtttaatatattatatagatgtagcgtagctcctacaggaatatctttaactaagtcaatgatttcatcaaccgttagatctattttaaagttaatcatataggcattgatttttaaaaggtatgtagccttgactacattctcattaattaaccattccaagtcattgtgtgtaagaagattatattctatcataagcttgactacatttggtcccgataccattaaagaattcttatgatataaggaaacagattttaggtactcatctactctacaagaattttggagagccttaacgatatcagtgacgtttattatttcaggaggaaagaatctaacattgagaatatcggaattaatagcttccagatacagtgattttggcaatagtccgtgtaatccataatccagtaacacgagctggtgcttgctagacaccttttcaatgtttaatttttttgaaataagctttgataaagccttcctcgcaaattccggatacatgaacatgtcggcgacatgattaagtattgttttttcattatttttatattttctcaacaagttctcaataccccaatagatgatagaatatcacccaatgcgtccatgttgtctatttccaacaggtcgctatatccaccaatagaagtttttccaaaaaagattctaggaacagttctaccaccagtaatttgttcaaaataatcccgcaattcattttcgggtttaaattctttaatatcgacaatttcatacgctcctcttttgaaactaaacttatttagaatatccagtgcatttctacaaaaaggacatgtatacttgacaaaaattgtcactttgttattggccaacctttgttgtacaaattcctcggccattttaatatttaagtgatataaaactatctcgacttatttaactctttagtcgagatatatggacgcagatagctatatgatagccaactacagaaggcaaacgctataaaaaacataattacgacgagcatatttataaatatttttattcagcattacttgatatagtaatattaggcacagtcaaacattcaaccactctcgatacattaactctctcattttctttaacaaattctgcaatatcttcgtaaaaagattcttgaaactttttagaatatctatcgactctagatgaaatagcgttcgtcaacatactatgttttgtatacataaaggcgcccattttaacagtttctagtgacaaaatgctagcgatcctaggatcctttagaatcacatagattgacgattcgtctctcttagtaactctagtaaaataatcatacaatctagtacgcgaaataatattatccttgacttgaggagatctaaacaatctagttttgagaacatcgataagttcatcgggaatgacatacatactatctttaatagaactcttttcatccagttgaatggattcgtccttaaccaactgattaatgagatcttctattttatcattttccagatgatatgtatgtccattaaagttaaattgtgtagcgcttctttttagtctagcagccaatactttaacatcactaatatcgatatacaaaggagatgatttatctatggcattaagaattcgtttttcgacatccgtcaaaaccaattcctttttgcctgtatcatccagttttccatcctttgtaaagaaattattttctactagactattaataagactgataaggattcctccataattgcacaatccaaactttttaacaaaactagactttacgagatctacaggaatgcgtacttcaggttttttagcttgtgattttttcttttgcggacattttctagtaaccaactcatctaccatttcattgattttagcagtgaaataagctttcaatgcacgggcactgatactattgaaaacgagttgatcttcaaattccgccatttaagttcaccaaacaacttttaaatacaaatatatcaatagtagtagaataagaactataaaaaaaataataattaaccaaccccaacaaccggtattattagttgatgtggtagttttctcatcacttagaacagatttaacaatttctataaagtctgtcaaatcatcttccggagaccccataaatacaccaaatatagcggcgtacaacttatccatttatacattgaatattggcttttctttatcgctatcttcatcatattcatcatcaatatcaacaagtcccagattacgagccagatcttcttctacattttcagtcattgatacacgttcactatctccagagagtccgataacgttagccaccacttctctatcaatgattagtttcttgagcgcgaaagtaatttttgtttccgttccggatctatagaagacgataggtgtgataattgccttggccaattgtctttctcttttactgagtgattctagttcaccttctatagatctgagaatggatgattctccagtcgaaacatattctaccatggatccgtttaatttgttgatgaagatggattcatccttaaatgttttctctgtaatagtttccaccgaaagactatgcaaagaatttggaatgcgttccttgtgcttaatgtttccatagacggcttctagaagttgatacaacataggactagccgcggtaacttttatttttagaaagtatccatcgcttctatcttgtttagatttatttttataaagtttagtctctccttccaacataataaaagtggaagtcatttgactagataaactatcagtaagttttatagagatagacgaacaattagcgtattgagaagcatttagtgtaacgtattcgatacattttgcattagatttactaatcgattttgcatactctataacacccgcacaagtctgtagagaatcgctagatgcagtaggtcttggtgaagtttcaactctcttcttgattaccttactcatgattaaacctaaataattgtactttgtaatataatgatatatattttcactttatctcatttgagaataaaaatgtttttgtttaaccactgcatgatgtacagatttcggaatcgcaaaccaccagtggttttattttatccttgtccaatgtgaattgaatgggagcggatgcgggtttcgtacgtagatagtacattcccgtttttagaccgagactccatccgtaaaaatgcatactcgttagtttggaataactcggatctgctatatggatattcatagattgactttgatcgatgaaggctcccctgtctgcagccatttttatgatcgtcttttgtggaatttcccaaatagttttataaactcgcttaatatcttctggaaggtttgtattctgaatggatccaccatctgccataatcctattcttgatctcatcattccataattttctctcggttaaaactctaaggagatgcggattaactacttgaaattctccagacaatactctccgagtgtaaatattactggtatacggttccaccgactcattatttcccaaaatttgagcagttgatgcagtcggcataggtgccaccaataaactatttctaagaccgtatgttctgattttatcttttagaggttcccaattccaaagatccgacggtacaacattccaaagatcatattgtagaataccgttactggcgtacgatcctacatatgtatcgtatggtccttccttctcagctagttcacaactcgcctctaatgcaccgtaataaatggtttcgaagatcttcttatttagatcttgtgcttccaggctatcaaatggataatttaagagaataaacgcgtccgctaatccttgaacaccaataccgataggtctatgtctcttattagagatttcagcttctggaataggataataattaatatctataattttattgagatttctgacaattactttgaccacatccttcagtttgagaaaatcaaatcgcccatctattacaaacatgttcaaggcaacagatgccagattacaaacggctacctcattagcatccgcatattgtattatctcagtgcaaagattactacacttgatagttcctaaattttgttgattactctttttgttacacgcatccttataaagaatgaatggagtaccagtttcaatctgagattctataatcgctttccagacgactcgagcctttattatagatttgtatctcctttctctttcgtatagtgtatacaatcgttcgaactcgtctccccaaacattgtccaatccaggacattcatccggacacatcaacgaccactctccgtcatccttcactcgtttcataaagagatcaggaatccaaagagctataaatagatctctggttctatgttcctcgtttcctgtattctttttaagatcgaggaacgccataatatcagaatgccacggttccaagtatatggccataactccaggccgtttgtttcctccctgatctatgtatctagcggtgttattataaactctcaacattggaataataccgtttgatataccattggtaccggagatatagcttccactggcacgaatattactaattgatagacctattccccctgccattttagagattaatgcgcatcgttttaacgtgtcatagataccctctatgctatcatcgatcatgttaagtagaaaacagctagacatttggtgacgactagttcccgcattaaataaggtaggagaagcgtgcgtaaaccatttttcagaaagtagattgtacgtctcaatagctgagtctatatcccattgatgaattcctactgcgacacgcattaacatgtgctgaggtctttcaacgatcttgttgtttattttcaacaagtaggatttttccaaagttttaaaaccaaaatagttgtatgaaaagtctcgttcgtaaataataaccgagttgagtttatccttatatttgttaactatatccatggtgatacttgaaataatcggagaatgtttcccatttttaggattaacatagttgaataaatcctccatcacttcactaaatagtttttttgtttccttgtgtagatttgatacggctattctggcggctagaatggcataatccggatgttgtgtagtacaagtggctgctatttcggctgccagagtgtccaattctaccgttgttactccattatatattccttgaataaccttcatagctattttaataggatctatatgatccgtgtttaagccataacataattttctaatacgagacgtgattttatcaaacatgacattttccttgtatccatttcgtttaatgacaaacatttttgttggtgtaataaaaaaattatttaacttttcattaatagggatttgacgtatgtagcgtacaaaatgattgttcctggtatatagataaagagtcctatatatttgaaaatcgttacggctcgattaaactttaatgattgcatagtgaatatatcattaggatttaactccttgactatcatggcggcgccagaaattaccatcaaaagcattaatacagttataccgatcgcagttagaacggttatagcatccaccatttatatctaaaaattagatcaaagaatatgtgacaaagtcctagttgtatactgagaattgacgaaacaatgtttcttacatatttttttcttattagtaaccgacttaatagtaggaactggaaaactagacttgattattctataagtatagatacccttccaaataatattctctttgataaaagttccagaaaatgtagaattttttaaaaagttatcttttgctattaccaagattgtgtttagacgcttattattaatatgagtgatgaaatccacaccgcctctagatatcgcctttatttccacattagatggtaaatccaatagtgaaactatctttttaggaatgtatggactcgcgtttagaggagtaaacgtcttaggcgtcggaaaggatgattcatcaaacgaataaacaatttcacaaatggatgttaatgtattagtaggaaattttttgacgctattggaattgaagattctaatggatgatgttctacctatttcatccgataacatgttaatttccgacaccaacggttttaatatttcgatgatatacggtagtctctctttcggacttatatagcttattccacaatacgagtcattatatactccaaaaaacaaaataactagtataaaatctgtatcgaatgggaaaaacgaaattatcgacataggtatagaatccggaacattgaacgtattaatacttaattctttttctgtggtaagtaccgataggttattgacattgtatggttttaaatattctataacttgagacttgatagatattagtgatgaattgaaaattatttttatcaccacgtgtgtttcaggatcatcgtcgacgcccgtcaaccaaccgaacggagtaaaataaatatcattaatatatgctctagatattagtatttttatcaatcctttgattatcatcttctcgtaggcgaatgattccatgatcaagagtgatttaagaacatcctccggagtattaatgggcttagtaaacagtccatcgttgcaataataaaagttatccaagttaaaggatattatgcattcgtttaaagatatcacctcatctgacggagacaattttttggtaggttttagagactttgaagctacttgtttaacaaagttattcatcgtcgtctactattctatttaattttgtagttaatttatcacatatcacattaattgactttttggtccacttttccatacgtttatattcttttaatcctgcgttatccgtttccgttatatccagggatagatcttgcaagttaaatagaatgctcttaaataatgtcattttcttatccgctaaaaatttaaagaatgtataaacctttttcagagatttgaaactcttaggtggtgtcctagtacacaatatcataaacaaactaataaacattccacattcagattccaacagctgattaacttccacattaatacagcctattttcgctccaaatgtacattcgaaaaatctgaataaaacatcgatgtcacaatttgtattatccaatacagaatgtttgtgattcgtgttaaaaccatcggagaaggaatagaaataaaaattattatagtggtggaattcagttggaatattgcctccggagtcataaaaggatactaaacattgttttttatcataaattacacatttccaatgagacaaataacaaaatccaaacattacaaatctagaggtagaacttttaattttgtctttaagtatatacgataagatatgtttattcataaacgcgtcaaatttttcatgaatcgctaaggagtttaagaatctcatgtcaaattgtcctatataatccacttcggatccataagcaaactgagagactaagttcttaatacttcgattgctcatccaggctcctctctcaggctctattttcatcttgacgacctttggattttcaccagtatgtattcctttacgtgataaatcatcgattttcaaatccatttgtgagaagtctatcgccttagatactttttcccgtagtcgaggtttaaaaaaatacgctaacggtatactagtaggtaactcaaagacatcatatatagaatggtaacgcgtctttaactcgtcggttaactctttcttttgatcgagttcgtcgctactattgggtctgctcaggtgccccgactctactagttccaacatcataccgataggaatacaagacactttgccggcggttgtagatttatcatatttttccactacatatccgttacaatttgttaaaaatttagatacatctatattgctacataatccagctagtgaatatatatgacataataaattggtaaatcctagttctggtattttactaattactaaatctgtatatctttccatttatcatggaaaagaatttaccagatatcttcttttttccaaactgcgttaatgtattctcttacaaatattcacaagatgaattcagtaatatgagtaaaacggaacgtgatagtttctcattggccgtgtttccagttataaaacatagatggcataacgcacacgttgtaaaacataaaggaatatacaaagttagtacagaagcacgtggaaaaaaagtatctcctccatcactaggaaaacccgcacacataaacctaaccgcgaagcaatatatatacagtgaacacacaataagctttgaatgttatagttttctaaaatgtataacaaatacagaaatcaattcgttcgatgagtatatattaagaggactattagaagctggtaatagtttacagatattttccaattccgtaggtaaacgaacagatactataggtgtactagggaataagtatccatttagcaaaattccattggcctcattaactcctaaagcacaacgagagatattttcagcgtggatttctcatagacctgtagttttaactggaggaactggagtgggtaagacgtcacaggtacccaagttattgctttggtttaattatttatttggtggattctctactctagataaaatcactgactttcacgaaagaccagtcattctatctcttcctaggatagctttagttagattgcatagcaataccattttaaaatcattgggatttaaggtactagatggatctcctatttctttacggtacggatctataccggaagaattaataaacaaacaaccaaaaaaatatggaattgtattttctacccataagttatctctaacaaaactatttagttatggcactcttattatagacgaagttcatgagcatgatcaaataggagatattattatagcagtagcgagaaagcatcatacgaaaatagattctatgtttttaatgactgccacgttagaggatgacagggaacggctaaaagtatttttacctaatcccgcatttatacatattcctggagatacactgtttaaaattagcgaggtatttattcataataagataaatccatcttccagaatggcatacatagaagaagaaaagagaaatttagttactgctatacagatgtatactcctcctgatggatcatccggtatagtctttgtggcatccgttgcacagtgtcacgaatataaatcatatttagaaaaaagattaccgtatgatatgtatattattcatggtaaggtcttagatatagacgaaatattagaaaaagtgtattcatcacctaatgtatcgataattatttctactccttatttggaatccagcgttactatacgcaatgttacacacatttatgatatgggtagagtttttgtccccgctccttttggaggatcgcaacaatttatttctaaatctatgagagatcaacgaaaaggaagagtaggaagagttaatcctggtacatacgtctatttctatgatctgtcttatatgaagtctatacagcgaatagattcagaatttctacataattatatattgtacgctaataagtttaatctaacactccccgaagatttgtttataatccctacaaatttggatattctatggcgtacaaaggaatatatagactcgttcgatattagtacagaaacatggaataaattattatccaattattatatgaagatgatagagtatgctaaactttatgtactaagtcctattctcgctgaggagttggataactttgagaggacgggagaattaactagtattgtacgagaagccattttatctctaaatttacaaattaagattttaaattttaaacataaagatgatgatacgtatatacacttttgtaaaatattattcggtgtctataacggaacaaacgctactatatattatcatagacctctaacgggatatatgaatatgatttcagatactatatttgttcctgtagataataactaaaaatcaaactctaatgaccacatctttttttagagatgaaaaattttccacatctccttttgtagacacgactaaacattttgcagaaaaaagtttattagtgtttagataatcgtatacttcatcagtgtagatagtaaatgtgaacagataaaaggtattcttgctcaatagattggtaaattccatagaatatattaatcctttcttcttgagatcccacatcatttcaaccagagacgttttatccaatgatttacctcgtactataccacatacaaaactagattttgcagtgacgtcgtacctggtattcctaccaaacaaaattttacttttagttcttttagaaaattctaaggtagaatctctatttgccaatatgtcatctatggaattaccactagcaaaaaatgatagaaatatatattgatacatcgcagctggttttgatctactatactttaaaaacgaatcagattccataattgcctgtatatcatcagctgaaaaactatgttttacacgtattccttcggcatttctttttaatgatatatcttgtttagacaatgataaagttatcatgtccatgagagacgcgtctccgtatcgtataaatatttcattagatgttagacgcttcattaggggtatacttctataaggtttcttaatcagtccatcattggttgcgtcaagaactactatcggatgttgttgggtatctctagtgttacacatggccttactaaagtttgggtaaataactatgatatctctattaattatagatgcatatatttcattcgtcaaggatattagtatcgacttgctatcgtcattaatacgtgtaatgtaatcatataaatcatgcgatagccaaggaaaatttaaatagatgttcatcatataatcgtcgctataattcatattaatacgttgacattgactaatttgtaatatagcctcgccacgaagaaagctctcgtattcagtttcatcgataaaggataccgttaaatataactggttgccgatagtctcatagtctattaagtggtaagtttcgtacaaatacagaatccctaaaatattatctaatgttggattaatctttaccataactgtataaaatggagacggagtcataactattttaccgtttgtacttactggaatagatgaaggaataatctccggacatgctggtaaagacccaaatgtctgtttgaagaaatccaatgttccaggtcctaatctcttaacaaaaattacgatattcgatcccgatatcctttgcattctatttaccagcatatcacgaactatattaagattatctatcatgtctattctcccaccgttatataaatcgcctccgctaagaaacgttagtatatccatacaatggaatacttcatttctaaaatagtattcgttttctaattctttaatgtgaaatcgtatactagaaagggaaaaattatctttgagttttccgttagaaaagaaccacgaaactaatgttctgattgcgtccgattccgttgctgaattaatggatttacaccaaaaactcatataacttctagatgtagaagcattcgctaaaaaattagtagaatcaaaggatataagtagatgttccaacaagtgagcaattcccaagatttcatctatatcattctcgaatccgaaattagaaattcccaagtagatatcctttttcatccgatcgttgatgaaaatacgaactttattcggtaagacaatcatttactaaggagtaaaataggaagtaatgttcgtatgtcgttatcatcgtataaattaaaggtgtgttttttaccattaagtgacattataattttaccaatattggaattataatataggtgtatttgcgcactcgcgacggttgatgcatcggtaaatatagctgtatctaatgttctagtcggtatttcatcatttcgctgtctaataatagcgttttctctatctgtttccattacagctgcctgaagtttattggtcggataatatgtaaaataataagaaatacatacgaataacaaaaataaaataagatataataaagatgccatttagagatctaattttgtttaacttgtccaaattcctacttacagaagatgaggaatcgttggagatagtgtcttccttatgtagaggatttgaaatatcttataatgacttgataacttactttccagataggaaataccataaatatatttataaagtatttgaacatgtagatttatcggaggaattaagtatggaattccatgatacaactctgagagatttagtctatcttagattgtacaagtattccaagtgtatacggccgtgttataaattaggagataatctaaaaggcatagttgttataaaggacaggaatatttatattagggaagcaaatgatgacttgatagaatatctcctcaaggaatacactcctcagatttatacatattctaatgagcgcgtccccataactggttcaaaattaattctttgtggattttctcaagttacatttatggcgtatacaacgtcgcatataacaacaaataaaaaggtagatgttctcgtttccaaaaaatgtatagatgaactagtcgatccaataaattatcaaatacttcaaaatttatttgataaaggaagcggaacaataaacaaaatactcaggaagatattttattcggtaacaggtggccaaactccataggtagctttttctatttcggattttagaatttccaaattcaccagcgatttatcggttttggtgaaatccaaggatttattaatgtccacaaatgccatttgttttgtctgtggattgtatttgaaaatggaaacgatgtagttagatagatgcgctgcgaagtttcctattagggttccgcgcttcacgtcacccagcatacttgaatcaccatcctttaaaaaaaatgataagatatcaacatggagtatatcatactcgaattttaattcttctactgactcactgacattttcacaaatactacaatacggtttaccgaaaataatcagtacgttcttcatttatgggtatcaaaaacttaaaatcgttactgctggaaaataaatcactgacgatattagatgataatttatacaaagtatacaatggaatatttgtggatacaatgagtatttatatagccgtcgccaattgtgtcagaaacttagaagagttaactacggtattcataaaatacgtaaacggatgggtaaaaaagggagggcatgtaaccctttttatcgatagaggaagtataaaaattaaacaagacgttagagacaagagacgtaaatattctaaattaaccaaggacagaaaaatgttagaattagaaaagtgtacatccgaaatacaaaatgttaccggatttatggaagaagaaataaaggcagaaatgcaattaaaaatcgataaactcacatttcaaatatatttatctgattctgataacataaaaatatcattgaatgagatactaacacatttcaacaataatgagaatgttacattattttattgtgatgaacgagacgcagaattcgttatgtgtctcgaggctaaaacacatttctctaccacaggagaatggccgttgataataagtaccgatcaggatactatgctatttgcatctgctgataatcatcctaagatgataaaaaacttaactcaactgtttaaatttgttccctcggcagaggataactatttagcaaaattaacggcgttagtgaatggatgtgatttctttcctggactctatggggcatctataacacccaccaacttaaacaaaatacaattgtttagtgattttacaatcgataatatagtcactagtttggcaattaaaaattattatagaaagactaactctaccgtagacgtgcgtaatattgttacgtttataaacgattacgctaatttagacgatgtctactcgtatattcctccttgtcaatgcactgttcaagaatttatattttccgcattagatgaaaaatggaatgaatttaaatcatcttatttagaaagcgtgccgttaccctgccaattaatgtacgcgttagaaccacgcaaggagattgatgtttcagaagttaaaactttatcatcttatatagatttcgaaaatactaaatcagatatcgatgttataaaatctatatcctcgatcttcggatattctaacgaaaactgtaacacgatagtattcggcatctataaggataatttactactgagtataaataattcattttactttaacgatagtctgttaataaccaatactaaaagtgataatataataaatataggttactagattaaaaatggtgttccaactcgtgtgctctacatgcggtaaagatatttctcacgaacgatataaattgattatacgaaaaaaatcattaaaggatgtactcgtcagtgtaaagaacgaatgttgtaggttaaaattatctacacaaatagaacctcaacgtaacttaacagtgcaacctctattggatataaactaatatggatccggttaattttatcaagacatatgcgcctagaggttctattatttttattaattataccatgtcattaacaagtcatttgaatccatcgatagaaaaacatgtgggtatttattatggtacgttattatcggaacacttggtagttgaatctacctatagaaaaggagttcgaatagtcccattggatagtttttttgaaggatatcttagtgcaaaagtatacatgttagagaatattcaagttatgaaaatagcagctgatacgtcattaactttattgggtattccgtatggatttggtcatgatagaatgtattgttttaaattggtagctgactgttataaaaatgccggtattgatacatcgtctaaacgaatattgggcaaagatatttttctgagccaaaacttcacagacgataatagatggataaagatatatgattctaataatttaacattttggcaaattgattaccttaaagggtgagttaatatgcataactactcctccgttgttttttccctcgttctttttcttaacgttgtttgccatcactctcataatgtaaagatattctaaaatggtaaacttttgcatatcggacgcagaaattggtataaatgttgtaattgtattatttcccgtcaatggactagtcacagctccatcagttttatatcctttagagtatttctcactcgtgtctaacattctagagcattccatgatctgtttatcgttgatattggccggaaagatagattttttattttttattatattactattggcaattgtagatataacttctggtaaatatttttctaccttttcaatctcttctattttcaagccggctatatattctgctatattgttgctagtatcaataccttttctggctaagaagtcatatgtggtattcactatatcagttttaactggtagttccattagcctttccacttctgcagaataatcagaaattggttctttaccagaaaatccagctactataataggctcaccgatgatcattggcaaaatcctatattgtaccagattaatgagagcatatttcatttccaataattctgctagttcttgagacattgatttatttgatgaatctagttggttctctagatactctaccatttctgccgcatacaataacttgttagataaaatcagggttatcaaagtgtttagcgtggctagaatagtgggcttgcatgtattaaagaatgcggtagtatgagtaaaccgttttaacgaattatatagtctccagaaatctgtggcgttacatacatgagccgaatgacatcgaagattgtccaatatttttaatagctgctctttgtccattatttctatatttgactcgcaacaattgtagataccattaatcaccgattcctttttcgatgccggacaatagcacaattgtttagctttggactctatgtattcagaattaatagatatatctctcaatacagattgcactatacattttgaaactatgtcaaaaattgtagaacgacgctgttctgcagccatttaactttaaataatttacaaaaatttaaaatgagcatccgtataaaaatcgataaactgcgccaaattgtggcatatttttcagagttcagtgaagaagtgtctataaatgtagactcgacggatgagttaatgtatatttttgccgccttgggcggatctgtaaacatttgggcaattatacctctaagtgcatcagtgttttaccgaggagccgaaaatattgtgtttaatcttcctgtgtccaaggtaaaatcgtgtttgtgtagttttcacaatgatgccatcatagatatagaacctgatctggaaaataatctagtaaaactttctagttatcatgtagtaagtgtcgattgtaacaaggaactgatgcctattaggacagatactactatttgtctaagtatagatcaaaagaaatcttacgtgtttaattttcacaagtatgaagaaaaatgttgtggtagaaccgtcattcatctagaatggttgttgggctttatcaagtgtattagtcagcatcagcatctggctattatgtttaaagatgacaatattattatgaagactcctggtaatactgatgcgttttccagggaatattctatgactgaatgttctcaagaactacaaaagttttctttcaaaatagctatctcgtctctcaacaaactacgaggattcaaaaagagagtcaatgtttttgaaactagaatcgtaatggataatgacgataacattttaggaatgttgttttcggatagagttcaatcctttaagatcaacatctttatggcgtttttagattaatactttcaatgagataaatatgggtggcggagtaagtgttgagctccctaaacgggatccgcctccgggagtacccactgatgagatgttattaaacgtggataaaatgcatgacgtgatagctcccgctaagcttttagaatatgtgcatataggaccactagcaaaagataaagaggataaagtaaagaaaagatatccagagtttagattagtcaacacaggacccggtggtctttcggcattgttaagacaatcgtataatggaaccgcacccaattgctgtcgcacttttaatcgtactcattattggaagaaggatggaaagatatcagataagtatgaagagggtgcagtattagaatcgtgttggccagacgttcacgacactggaaaatgcgatgttgatttattcgactggtgtcagggggatacgttcgatagaaacatatgccatcagtggatcggttcagcctttaataggagtaatagaactgtagagggtcaacaatcgttaataaatctgtataataagatgcaaacattatgtagtaaagatgctagtgtaccaatatgcgaatcatttttgcattatttacgcgcacacaatacagaagatagcaaagagatgatcgattatattctaagacaacagtctgcggactttaaacagaaatatatgagatgtagttatcccactagagataagttagaagagtcattaaaatatgcggaacctcgagaatgttgggatccagagtgttcgaatgccaatgttaatttcttactaacacgtaattataataatttaggactttgcaatattgtacgatgtaataccagcgtgaacaacttacagatggataaaacttcctcattaagattgtcatgtggattaagcaatagtgatagattttctactgttcccgtcaatagagcaaaagtagttcaacataatattaaacactcgttcgacctaaaattgcatttgatcagtttattatctctcttggtaatatggatactaattgtagctatttaaatgggtgccgcggcaagcatacagacgacggtgaatacactcagcgaacgtatctcgtctaaattagaacaagaagcgaacgctagtgctcaaacaaaatgtgatatagaaatcggaaatttttatatccgacaaaaccatggatgtaacctcactgttaaaaatatgtgctctgcggacgcggatgctcagttggatgctgtgttatcagccgctacagaaacatatagtggattaacaccggaacaaaaagcatacgtgccagctatgtttactgctgcgttaaacattcagacgagtgtaaacactgttgttagagattttgaaaattatgtgaaacagacttgtaattctagcgcggtcgtcgataacaaattaaagatacaaaacgtaatcatagatgaatgttacggagccccaggatctccaacaaatttggaatttattaatacaggatctagcaaaggaaattgtgccattaaagcgttgatgcaattgacgactaaggccactactcaaatagcacctagacaagttgctggtacaggagttcagttttatatgattgttatcggtgttataatattggcagcgttgtttatgtactatgccaagcgtatgttgttcacatccaccaatgataaaatcaaacttattttagccaataaggaaaacgtccattggactacttacatggacacattctttagaacttctccgatggttattgctaccacggatatgcaaaactgaaaatatattgataatattttaatagattaacatggaagttatcgctgatcgtctagacgatatagtgaaacaaaatatagcggatgaaaaatttgtagattttgttatacacggtctagagcatcaatgtcctgctatacttcgaccattaattaggttgtttattgatatactattatttgttatagtaatttatatttttacggtacgtctagtaagtagaaattatcaaatgttgttggtggtgctagtcatcacattaactattttttattactttatactataatagtactagactgacttctaacaaacatctcacctgccataaataaatgcttgatattaaagtcttctatttctaacactattccatctgtggaaaataatactctgacattatcgctaattgacacatcggtgagtgatatgcctataaagtaataatcttctttgggcacatataccagtgtaccaggttctaacaacctatttactggtgctcctgtagcatactttttctttaccttgagaatatccatcgtttgcttggtcaatagcgatatgtgattttttatcaaccactcaaaaaagtaattggagtgttcatatcctctacgggctattgtctcatggccgtgtatgaaatttaagtaacacgactgtggtagatttgttctatagagccgattgccgcaaatagatagaactaccaatatgtctgtacaaatgttaaacattaattgattaacagaaaaaacaatgttcgttctgggaatagaaaccagatcaaaacaaaattcgttagaatatatgccacgtttatacatggaatataaaataactacagtttgaaaaataacagtatcatttaaacatttaacttgcggggttaatctcacaactttactgtttttgaactgttcaaaatatagcatcgatccgtgagaaatacgtttagccgcctttaatagaggaaatcccaccgcctttctggatctcaccaacgacgatagttctgaccagcaactcatttcttcatcatccacctgttttaacatataataggcaggagatagatatccgtcattgcaatattccttctcgtaggcacacaatctaatattgataaaatctccattctcttctctgcatttattatcttgtctcggtggctgattaggctgtggtcttggtttaggccttggtctatcgttgttgaatctattttggtcattaaatctttcatttcttcctggtatatttctatcacctcgtttggttggatttttgtctatattatcgtttgtaacatcggtacgggtattcatttatcacaaaaaaaacttctctaaatgagtctactgctagaaaacctcatcgaagaagataccatattttttgcaggaagtatatctgagtatgatgatttacaaatggttattgccggcgcaaaatccaaatttccaagatctatgctttctatttttaatatagtacctagaacgatgtcaaaatatgagttggagttgattcataacgaaaatatcacaggagcaatgtttaccacaatgtataatataagaaacaatttgggtctaggagatgataaactaactattgaagccattgaaaactatttcttggatcctaacaatgaagttatgcctcttattattaataatacggatatgactgccgtcattcctaaaaaaagtggtaggagaaagaataagaacatggttatcttccgtcaaggatcatcacctatcttgtgcattttcgaaactcgtaaaaagattaatatttataaagaaaatatggaatccgcgtcgactgagtatacacctatcggagacaacaaggctttgatatctaaatatgcgggaattaatgtcctgaatgtgtattctccttccacatccataagattgaatgccatttacggattcaccaataaaaataaactagagaaacttagtactaataaggaactagaatcgtatagttctagccctcttcaagaacccattaggttaaatgattttctgggactattggaatgtgttaaaaagaatattcctctaacagatattccgacaaaggattgattactataaatggagaatgttcctaatgtatactttaatcctgtgtttatagagcccacgtttaaacattctttattaagtgtttataaacacagattaatagttttatttgaagtattcgttgtattcattctaatatatgtattttttagatctgaattaaatatgttcttcatgcctaaacgaaaaatacccgatcctattgatagattacgacgtgctaatctagcgtgtgaagacgataaattaatgatctatggattaccatggatgacaactcaaacatctgcgttatcaataaatagtaaaccgatagtgtataaagattgtgcaaagcttttgcgatcaataaatggatcacaaccagtatctcttaacgatgttcttcgcagatgatgattcattttttaagtatttggctagtcaagatgatgaatcttcattatctgatatattgcaaatcactcaatatctagactttctgttattattattgatccaatcaaaaaataaattagaagctgtgggtcattgttatgaatctctttcagaggaatacagacaattgacaaaattcacagactttcaagattttaaaaaactgtttaacaaggtccctattgttacagatggaagggtcaaacttaataaaggatatttgttcgactttgtgattagtttgatgcgattcaaaaaagaatcctctctagctaccaccgcaatagatcctgttagatacatagatcctcgtcgcaatatcgcattttctaacgtgatggatatattaaagtcgaataaagtgaacaataattaattctttattgtcatcatgaacggcggacatattcagttgataatcggccccatgttttcaggtaaaagtacagaattaattagacgagttagacgttatcaaatagctcaatataaatgcgtgactataaaatattctaacgataatagatacggaacgggactatggacgcatgataagaataattttgaagcattggaagcaactaaactatgtgatgtcttggaatcaattacagatttctccgtgataggtatcgatgaaggacagttctttccagacattgttgaattagatcgataaaaattaattaattacccgggtaccaggcctagatctgtcgagatccggtggtggtgcaaatcaaagaactgctcctcagtggatgttgcctttacttctaggcctgtacggaagtgttacttctgctctaaaagctgctgcagggggggggggggggtgggggggccggttagggccgccatcccctcagagcgtcgggatatcgggtggcggctcgggacggaggacgcgctagtgttcttctgtgtggcagttcagaatgatggatcaagctagatcagcattctctaacttgtttggtggagaaccattgtcatatacccggttcagcctggctcggcaagtagatggcgataacagtcatgtggagatgaaacttgctgtagatgaagaagaaaatgctgacaataacacaaaggccaatgtcacaaaaccaaaaaggtgtagtggaagtatctgctatgggactattgctgtgatcgtctttttcttgattggatttatgattggctacttgggctattgtaaaggggtagaaccaaaaactgagtgtgagagactggcaggaaccgagtctccagtgagggaggagccaggagaggacttccctgcagcacgtcgcttatattgggatgacctgaagagaaagttgtcggagaaactggacagcacagacttcaccagcaccatcaagctgctgaatgaaaattcatatgtccctcgtgaggctggatctcaaaaagatgaaaatcttgcgttgtatgttgaaaatcaatttcgtgaatttaaactcagcaaagtctggcgtgatcaacattttgttaagattcaggtcaaagacagcgctcaaaactcggtgatcatagttgataagaacggtagacttgtttacctggtggagaatcctgggggttatgtggcgtatagtaaggctgcaacagttactggtaaactggtccatgctaattttggtactaaaaaagattttgaggatttatacactcctgtgaatggatctatagtgattgtcagagcagggaaaatcacctttgcagaaaaggttgcaaatgctgaaagcttaaatgcaattggtgtgttgatatacatggaccagactaaatttcccattgttaacgcagaactttcattctttggacatgctcatctggggacaggtgacccttacacacctggattcccttccttcaatcacactcagtttccaccatctcggtcatcaggattgcctaatatacctgtccagacaatctccagagctgctgcagaaaagctgtttgggaatatggaaggagactgtccctctgactggaaaacagactctacatgtaggatggtaacctcagaaagcaagaatgtgaagctcactgtgagcaatgtgctgaaagagataaaaattcttaacatctttggagttattaaaggctttgtagaaccagatcactatgttgtagttggggcccagagagatgcatggggccctggagctgcaaaatccggtgtaggcacagctctcctattgaaacttgcccagatgttctcagatatggtcttaaaagatgggtttcagcccagcagaagcattatctttgccagttggagtgctggagactttggatcggttggtgccactgaatggctagagggatacctttcgtccctgcatttaaaggctttcacttatattaatctggataaagcggttcttggtaccagcaacttcaaggtttctgccagcccactgttgtatacgcttattgagaaaacaatgcaaaatgtgaagcatccggttactgggcaatttctatatcaggacagcaactgggccagcaaagttgagaaactcactttagacaatgctgctttccctttccttgcatattctggaatcccagcagtttctttctgtttttgcgaggacacagattatccttatttgggtaccaccatggacacctataaggaactgattgagaggattcctgagttgaacaaagtggcacgagcagctgcagaggtcgctggtcagttcgtgattaaactaacccatgatgttgaattgaacctggactatgagaggtacaacagccaactgctttcatttgtgagggatctgaaccaatacagagcagacataaaggaaatgggcctgagtttacagtggctgtattctgctcgtggagacttcttccgtgctacttccagactaacaacagatttcgggaatgctgagaaaacagacagatttgtcatgaagaaactcaatgatcgtgtcatgagagtggagtatcacttcctctctccctacgtatctccaaaagagtctcctttccgacatgtcttctggggctccggctctcacacgctgccagctttactggagaacttgaaactgcgtaaacaaaataacggtgcttttaatgaaacgctgttcagaaaccagttggctctagctacttggactattcagggagctgcaaatgccctctctggtgacgtttgggacattgacaatgagttttaaatgtgatacccatagcttccatgagaacagcagggtagtctggtttctagacttgtgctgatcgtgctaaattttcagtagggctacaaaacctgatgttaaaattccatcccatcatcttggtactactagatgtctttaggcagcagcttttaatacagggtagataacctgtacttcaagttaaagtgaataaccacttaaaaaatgtccatgatggaatattcccctatctctagaattttaagtgctttgtaatgggaactgcctctttcctgttgttgttaatgaaaatgtcagaaaccagttatgtgaatgatctctctgaatcctaagggctggtctctgctgaaggttgtaagtggtcgcttactttgagtgatcctccaacttcatttgatgctaaataggagataccaggttgaaagaccttctccaaatgagatctaagcctttccataaggaatgtagctggtttcctcattcctgaaagaaacagttaactttcagaagagatgggcttgttttcttgccaatgaggtctgaaatggaggtccttctgctggataaaatgaggttcaactgttgattgcaggaataaggccttaatatgttaacctcagtgtcatttatgaaaagaggggaccagaagccaaagacttagtatattttcttttcctctgtcccttcccccataagcctccatttagttctttgttatttttgtttcttccaaagcacattgaaagagaaccagtttcaggtgtttagttgcagactcagtttgtcagactttaaagaataatatgctgccaaattttggccaaagtgttaatcttaggggagagctttctgtccttttggcactgagatatttattgtttatttatcagtgacagagttcactataaatggtgtttttttaatagaatataattatcggaagcagtgccttccataattatgacagttatactgtcggttttttttaaataaaagcagcatctgctaataaaacccaacagatactggaagttttgcatttatggtcaacacttaagggttttagaaaacagccgtcagccaaatgtaattgaataaagttgaagctaagatttagagatgaattaaatttaattaggggttgctaagaagcgagcactgaccagataagaatgctggttttcctaaatgcagtgaattgtgaccaagttataaatcaatgtcacttaaaggctgtggtagtactcctgcaaaattttatagctcagtttatccaaggtgtaactctaattcccattttgcaaaatttccagtacctttgtcacaatcctaacacattatcgggagcagtatcttccataatgtataaagaacaaggtagtttttacctaccacagtgtctgtatcggagacagtgatctccatatgttacactaagggtgtaagtaattatcgggaacagtgtttcccataattttcttcatgcaatgacatcttcaaagcttgaagatcgttagtatctaacatgtatcccaactcctataattccctatcttttagttttagttgcagaaacattttgtggtcattaagcattgggtgggtaaattcaaccactgtaaaatgaaattactacaaaatttgaaatttagcttgggtttttgttacctttatggtttctccaggtcctctacttaatgagatagtagcatacatttataatgtttgctattgacaagtcattttaactttatcacattatttgcatgttacctcctataaacttagtgcggacaagttttaatccagaattgaccttttgacttaaagcagagggactttgtatagaaggtttgggggctgtggggaaggagagtcccctgaaggtctgacacgtctgcctacccattcgtggtgatcaattaaatgtaggtatgaataagttcgaagctccgtgagtgaaccatcattataaacgtgatgatcagctgtttgtcatagggcagttggaaacggcctcctagggaaaagttcatagggtctcttcaggttcttagtgtcacttacctagatttacagcctcacttgaatgtgtcactactcacagtctctttaatcttcagttttatctttaatctcctcttttatcttggactgacatttagcgtagctaagtgaaaaggtcatagctgagattcctggttcgggtgttacgcacacgtacttaaatgaaagcatgtggcatgttcatcgtataacacaatatgaatacagggcatgcattttgcagcagtgagtctcttcagaaaacccttttctacagttagggttgagttacttcctatcaagccagtacgtgctaacaggctcaatattcctgaatgaaatatcagactagtgacaagctcctggtcttgagatgtcttctcgttaaggagatgggccttttggaggtaaaggataaaatgaatgagttctgtcatgattcactattctagaacttgcatgacctttactgtgttagctctttgaatgttcttgaaattttagactttctttgtaaacaaatgatatgtccttatcattgtataaaagctgttatgtgcaacagtgtggagattccttgtctgatttaataaaatacttaaacactgaaaaaaaaaaaaaaaaaaaaaaaaaaaaaaaaaaaaaaaaaaaaaaaaaaaaaaaaaaaaaaaaaaaaaaaaaaaaaaaaagtaccttctgaggcggaaagaaccagccggatctcgacttcgagcttatttatattccaaaaaaaaaaaataaaatttcaatttttaagctttcactaattccaaacccacccgctttttatagtaagtttttcacccataaataataaatacaataattaatttctcgtaaaagtagaaaatatattctaatttattgcacggtaaggaagtagatcataactcgagcatgggagatcccgtcgttttacaacgtcgtgactgggaaaaccctggcgttacccaacttaatcgccttgcagcacatccccctttcgccagctggcgtaatagcgaagaggcccgcaccgatcgcccttcccaacagttgcgcagcctgaatggcgaatggcgctttgcctggtttccggcaccagaagcggtgccggaaagctggctggagtgcgatcttcctgaggccgatactgtcgtcgtcccctcaaactggcagatgcacggttacgatgcgcccatctacaccaacgtgacctatcccattacggtcaatccgccgtttgttcccacggagaatccgacgggttgttactcgctcacatttaatgttgatgaaagctggctacaggaaggccagacgcgaattatttttgatggcgttaactcggcgtttcatctgtggtgcaacgggcgctgggtcggttacggccaggacagtcgtttgccgtctgaatttgacctgagcgcatttttacgcgccggagaaaaccgcctcgcggtgatggtgctgcgctggagtgacggcagttatctggaagatcaggatatgtggcggatgagcggcattttccgtgacgtctcgttgctgcataaaccgactacacaaatcagcgatttccatgttgccactcgctttaatgatgatttcagccgcgctgtactggaggctgaagttcagatgtgcggcgagttgcgtgactacctacgggtaacagtttctttatggcagggtgaaacgcaggtcgccagcggcaccgcgcctttcggcggtgaaattatcgatgagcgtggtggttatgccgatcgcgtcacactacgtctgaacgtcgaaaacccgaaactgtggagcgccgaaatcccgaatctctatcgtgcggtggttgaactgcacaccgccgacggcacgctgattgaagcagaagcctgcgatgtcggtttccgcgaggtgcggattgaaaatggtctgctgctgctgaacggcaagccgttgctgattcgaggcgttaaccgtcacgagcatcatcctctgcatggtcaggtcatggatgagcagacgatggtgcaggatatcctgctgatgaagcagaacaactttaacgccgtgcgctgttcgcattatccgaaccatccgctgtggtacacgctgtgcgaccgctacggcctgtatgtggtggatgaagccaatattgaaacccacggcatggtgccaatgaatcgtctgaccgatgatccgcgctggctaccggcgatgagcgaacgcgtaacgcgaatggtgcagcgcgatcgtaatcacccgagtgtgatcatctggtcgctggggaatgaatcaggccacggcgctaatcacgacgcgctgtatcgctggatcaaatctgtcgatccttcccgcccggtgcagtatgaaggcggcggagccgacaccacggccaccgatattatttgcccgatgtacgcgcgcgtggatgaagaccagcccttcccggctgtgccgaaatggtccatcaaaaaatggctttcgctacctggagagacgcgcccgctgatcctttgcgaatacgcccacgcgatgggtaacagtcttggcggtttcgctaaatactggcaggcgtttcgtcagtatccccgtttacagggcggcttcgtctgggactgggtggatcagtcgctgattaaatatgatgaaaacggcaacccgtggtcggcttacggcggtgattttggcgatacgccgaacgatcgccagttctgtatgaacggtctggtctttgccgaccgcacgccgcatccagcgctgacggaagcaaaacaccagcagcagtttttccagttccgtttatccgggcaaaccatcgaagtgaccagcgaatacctgttccgtcatagcgataacgagctcctgcactggatggtggcgctggatggtaagccgctggcaagcggtgaagtgcctctggatgtcgctccacaaggtaaacagttgattgaactgcctgaactaccgcagccggagagcgccgggcaactctggctcacagtacgcgtagtgcaaccgaacgcgaccgcatggtcagaagccgggcacatcagcgcctggcagcagtggcgtctggcggaaaacctcagtgtgacgctccccgccgcgtcccacgccatcccgcatctgaccaccagcgaaatggatttttgcatcgagctgggtaataagcgttggcaatttaaccgccagtcaggctttctttcacagatgtggattggcgataaaaaacaactgctgacgccgctgcgcgatcagttcacccgtgcaccgctggataacgacattggcgtaagtgaagcgacccgcattgaccctaacgcctgggtcgaacgctggaaggcggcgggccattaccaggccgaagcagcgttgttgcagtgcacggcagatacacttgctgatgcggtgctgattacgaccgctcacgcgtggcagcatcaggggaaaaccttatttatcagccggaaaacctaccggattgatggtagtggtcaaatggcgattaccgttgatgttgaagtggcgagcgatacaccgcatccggcgcggattggcctgaactgccagctggcgcaggtagcagagcgggtaaactggctcggattagggccgcaagaaaactatcccgaccgccttactgccgcctgttttgaccgctgggatctgccattgtcagacatgtataccccgtacgtcttcccgagcgaaaacggtctgcgctgcgggacgcgcgaattgaattatggcccacaccagtggcgcggcgacttccagttcaacatcagccgctacagtcaacagcaactgatggaaaccagccatcgccatctgctgcacgcggaagaaggcacatggctgaatatcgacggtttccatatggggattggtggcgacgactcctggagcccgtcagtatcggcggaattccagctgagcgccggtcgctaccattaccagttggtctggtgtcaaaaataataataaccgggcaggggggatccaattctgtgagcgtatggcaaacgaaggaaaaatagttatagtagccgcactcgatgggacatttcaacgtaaaccgtttaataatattttgaatcttattccattatctgaaatggtggtaaaactaactgctgtgtgtatgaaatgctttaaggaggcttccttttctaaacgattgggtgaggaaaccgagatagaaataataggaggtaatgatatgtatcaatcggtgtgtagaaagtgttacatcgactcataatattatattttttatctaaaaaactaaaaataaacattgattaaattttaatataatacttaaaaatggatgttgtgtcgttagataaaccgtttatgtattttgaggaaattgataatgagttagattacgaaccagaaagtgcaaatgaggtcgcaaaaaaactgccgtatcaaggacagttaaaactattactaggagaattattttttcttagtaagttacagcgacacggtatattagatggtgccaccgtagtgtatataggatctgctcccggtacacatatacgttatttgagagatcatttctataatttaggagtgatcatcaaatggatgctaattgacggccgccatcatgatcctattttaaatggattgcgtgatgtgactctagtgactcggttcgttgatgaggaatatctacgatccatcaaaaaacaactgcatccttctaagattattttaatttctgatgtgagatccaaacgaggaggaaatgaacctagtacggcggatttactaagtaattacgctctacaaaatgtcatgattagtattttaaaccccgtggcgtctagtcttaaatggagatgcccgtttccagatcaatggatcaaggacttttatatcccacacggtaataaaatgttacaaccttttgctccttcatattcagctgaaatgagattattaagtatttataccggtgagaacatgagactgactcgagttaccaaattagacgctgtaaattatgaaaaaaagatgtactaccttaataagatcgtccgtaacaaagtagttgttaactttgattatcctaatcaggaatatgactattttcacatgtactttatgctgaggaccgtgtactgcaataaaacatttcctactactaaagcaaaggtactatttctacaacaatctatatttcgtttcttaaatattccaacaacatcaactgaaaaagttagtcatgaaccaatacaacgtaaaatatctagcaaaaattctatgtctaaaaacagaaatagcaagagatccgtacgcggtaataaatagaaacgtactactgagatatactaccgatatagagtataatgatttagttactttaataaccgttagacataaaattgattctatgaaaactgtgtttcaggtatttaacgaatcatccataaattatactccggttgatgatgattatggagaaccaatcattataacatcgtatcttcaaaaaggtcataacaagtttcctgtaaattttctatacatagatgtggtaatatctgacttatttcctagctttgttagactagatactacagaaactaatatagttaatagtgtactacaaacaggcgatggtaaaaagactcttcgtcttcccaaaatgttagagacggaaatagttgtcaagattctctatcgccctaatataccattaaaaattgttagatttttccgcaataacatggtaactggagtagagatagccgatagatctgttatttcagtcgctgattaatcaattagtagagatgagataagaacattataataatcaataatatatcttatatcttatatcttatatcttatatcttgtttagaaaaatgctaatattaaaatagctaacgctagtaatccaatcggaagccatttgatatctataatagggtatctaatttcctgatttaaatagcggacagctatattctcggtagctactcgtttggaatcacaaacattatttacatctaatttactatctgtaatggaaacgtttcccaatgaaatggtacaatccgatacattgcattttgttatatttttttttaaagaggctggtaacaacgcatcgcttcgtttacatggctcgtaccaacaataatagggtaatcttgtatctattcctatccgtactatgcttttatcaggataaatacatttacatcgtatatcgtctttgttagcatcacagaatgcataaatttgttcgtccgtcatgataaaaatttaaagtgtaaatataactattatttttatagttgtaataaaaagggaaatttgattgtatactttcggttctttaaaagaaactgacttgataaaaatggctgtaatctctaaggttacgtatagtctatatgatcaaaaagagattaatgctacagatattatcattagtcatgttaaaaatgacgacgatatcggtaccgttaaagatggtagactaggtgctatggatggggcattatgtaagacttgtgggaaaacggaattggaatgtttcggtcactggggtaaagtaagtatttataaaactcatatagttaagcctgaatttatttcagaaattattcgtttactgaatcatatatgtattcactgcggattattgcgttcacgagaaccgtattccgacgatattaacctaaaagagttatcgggacacgctcttaggagattaaaggataaaatattatccaagaaaaagtcatgttggaacagtgaatgtatgcaaccgtatcaaaaaattactttttcaaagaaaaaggtttgtttcgtcaacaagttggatgatattaacgttcctaattctctcatctatcaaaagttaatttctattcatgaaaagttttggccattattagaaattcatcaatatccagctaacttattttatacagactactttcccatccctccgttgattattagaccggctattagtttttggatagatagtatacccaaagagaccaatgaattaacttacttattaggtatgatcgttaagaattgtaacttgaatgctgatgaacaggttatccagaaggcggtaatagaatacgatgatattaaaattatttctaataacactaccagtatcaatttatcatatattacatccggcaaaaataatatgattagaagttatatcgtcgcccgacgaaaagatcagaccgctagatctgtaattggtcccagtacatctatcaccgttaatgaggtaggaatgcccgcatatattagaaatacacttacagaaaagatatttgttaatgcctttacagtggataaagttaaacaactattagcgtcaaaccaagttaaattttactttaataaacgattaaaccaattaacaagaatacgccaaggaaagtttattaaaaataaaatacatttattgcctggtgattgggtagaagtagctgttcaagaatatacaagtattatttttggaagacagccgtctctacatagatacaacgtcatcgcttcatctatcagagctaccgaaggagatactatcaaaatatctcccggaattgccaactctcaaaatgctgatttcgacggggatgaggaatggatgatattagaacaaaatcctaaagctgtaattgaacaaagtattcttatgtatccgacgacgttactcaaacacgatattcatggagcccccgtttatggatctattcaagatgaaatcgtagcagcgtattcattgtttaggatacaagatctttgtttagatgaagtattgaacatcttggggaaatatggaagagagttcgatcctaaaggtaaatgtaaattcagcggtaaagatatctatacttacttgataggtgaaaagattaattatccgggtctcttaaaggatggtgaaattattgcaaacgacgtagatagtaattttgttgtggctatgaggcatctgtcattggctggactcttatccgatcataagtcgaacgtggaaggtatcaactttattatcaagtcatcttatgtttttaagagatatctatctatttacggttttggggtgacattcaaagatctgagaccaaattcgacgttcactaataaattggaggccatcaacgtagaaaaaatagaacttatcaaagaagcatacgccaaatatctcaacgatgtaagagacgggaaaatagttccattatctaaagctttagaggcggactatgtggaatccatgttatccaacttgacaaatcttaatatccgagagatagaagaacatatgagacaaacgctgatagatgatccagataataacctcctgaaaatggccaaagcgggttataaagtaaatcccacagaactaatgtatattctaggtacgtatggacaacaaaggattgatggtgaaccagcagagactcgagtattgggtagagttttaccttactatcttccagactctaaggatccagaaggaagaggttacattcttaattctttaacaaaaggattaacgggttctcaatattacttttcgatgctggttgccagatctcaatctactgatatcgtctgtgaaacatcacgtaccggaacactggctagaaaaatcattaaaaagatggaggatatggtggtcgacggatacggacaagtagttataggtaatacgctcatcaagtacgccgccaattataccaaaattctaggctcagtatgtaaacctgtagatcttatctatccagatgagtccatgacttggtatttggaaattagtgctctgtggaataaaataaaacagggattcgtttactctcagaaacagaaacttgcaaagaagacattggcgccgtttaatttcctagtattcgtcaaacccaccactgaggataatgctattaaggttaaggatctgtacgatatgattcataacgtcattgatgatgtgagagagaaatacttctttacggtatctaatatagattttatggagtatatattcttgacgcatcttaatccttctagaattagaattacaaaagaaacggctatcactatctttgaaaagttctatgaaaaactcaattatactctaggtggtggaactcctattggaattatttctgcacaggtattgtctgagaagtttacacaacaagccctgtccagttttcacactactgaaaaaagtggtgccgtcaaacaaaaacttggtttcaacgagtttaataacttgactaatttgagtaagaataagaccgaaattatcactctggtatccgatgatatctctaaacttcaatctgttaagattaatttcgaatttgtatgtttgggagaattaaatccaaacatcactcttcgaaaagaaacagataaatatgtagtagatataatagtcaatagattatacatcaagagagcagaaataaccgaattagtcgtcgaatatatgattgaacgatttatctcctttagcgtcattgtaaaggaatggggtatggagacattcattgaggacgaggataatattagatttactgtctacctaaatttcgttgaaccggaagaattgaatcttagtaagtttatgatggttcttccgggggcagccaacaagggaaagattagtaaattcaagattcctatctctgattatacgggatatgacgacttcaatcaaacaaaaaagctcaataagatgactgtagaactcatgaatctaaaagaattgggttctttcgatttggaaaacgtcaacgtgtatcctggagtatggaatacatacgatatcttcggtatcgaggccgctcgtgaatacttgtgcgaagccatgttaaacacctatggagaagggttcgattatctgtatcagccttgtgatcttctcgctagtttactatgtgctagttacgaaccagaatcagtgaataaattcaagttcggcgcagctagtactcttaagagagctacgttcggagacaataaagcattgttaaacgcggctcttcataaaaagtcagaacctattaacgataatagtagctgccacttttttagcaaggtccctaatataggaactggatattacaaatactttatcgacttgggtcttctcatgagaatggaaaggaaactatctgataagatatcttctcaaaagatcaaggaaatggaagaaacagaagacttttaattcttatcaataacatatttttctatgatctgtcttttaaacgatggattttccacaaatgcgcctctcaagtccctcatagaatgatacacgtataaaaaatatagcataggcaatgactccttatttttagacattagatatgccaaaatcatagccccgcttctatttactcccgcagcacaatgaaccaacacgggctcgtttcgttgatcacatttagataaaaaggcggttacgtcgtcaaaatatttactaatatcggtagttgtatcatctaccaacggtatatgaataatattaatattagagttaggtaatgtatatttatccatcgtcaaatttaaaacatatttgaacttaacttcagatgatggtgcatccatagcatttttataatttcccaaatacacattattggttacccttgtcattatagtgggagatttggctttgtgcatatctccagttgaacgtagtagtaagtatttatacaaacttttcttatccatttataacgtacaaatggataaaactactttatcggtaaacgcgtgtaatttagaatacgttagagaaaaggctatagtaggcgtacaagcagccaaaacatcaacacttatattctttgttattatattggcaattagtgcgctattactctggtttcagacgtctgataatccagtctttaatgaattaacgagatatatgcgaattaaaaatacggttaacgattggaaatcattaacggatagcaaaacaaaattagaaagtgatagaggtagacttctagccgctggtaaggatgatatatttgaattcaaatgtgtggatttcggcgcctattttatagctatgcgattggataagaaaacatatctgccgcaagctattaggcgaggtactggagacgcgtggatggttaaaaaggcggcaaaggtcgatccatctgctcaacaattttgtcagtatttgataaaacacaagtctaataatgttattacttgtggtaatgagatgttaaatgaattaggttatagcggttattttatgtcaccgcattggtgttccgattttagtaatatggaatagtgttagataaatgcggtaacgaatgttcctgtaaggaaccataacagcttagatttaacgttaaagatgagcataaacataataaacaaaattacaatcaaacttataacattaatatcaaacaatccaaaaaatgaaatcagtggagtagtaaacgcgtacataactcctggataacgtttagcagctgccgttcctattctagaccaaaaattcggtttcatgttttcgaaacggtattctgcaacaagtcgaggatcgtgttctacatatttggcggcattatccagtatctgcctattgatcttcatttcgttttcgattctggctatttcaaaataaaatcccgatgatagacctccagactttataatttcatctacgatgttcagcgccgtagtaactctaataatataggctgataagctaacatcataccctcctgtatatgtgaatatggcatgatttttgtccattacaagctcggttttaactttattgcctgtaataatttctctcatctgtaggatatctatttttttgtcatgcattgccttcaagacgggacgaagaaacgtaatatcctcaataacgttatcgttttctacaataactacatattctacctttttattttctaactcggtaaaaaaattagaatcccatagggctaaatgtctagcgatatttcttttcgtttcctctgtacacatagtgttacaaaaccctgaaaagaagtgagtatacttgtcatcatttctaatgtttcctccagtccactgtataaacgcataatccttgtaatgatctggatcatccttgactaccacaacatttcttttttctggcataacttcgttgtcctttacatcatcgaacttctgatcattaatatgctcatgaacattaggaaatgtttctgatggaggtctatcaataactggcacaacaataacaggagttttcaccgccgccatttagttattgaaattaatcatatacaactctttaatacgagttatattttcgtctatccattgtttcacattgacatatttcgacaaaaagatataaaatgcgtattccaatgcttctctgtttaatgaattactaaaatatacaaacacgtcactgtctggcaataaatgatatcttagaatattgtaacaatttattttgtattgcacatgttcgtgatctatgagttcttcttcgaatggcataggatctccgaatctgaaaacgtataaataggagttagaataataatatttgagagtattggtaatatataaactctttagcggtataattagtttttttctctcaatttctatttttagatgtgatggaaaaatgactaattttgtagcattagtatcatgaactctaatcaaaatcttaatatcttcgtcacacgttagctctttgaagtttttaagagatgcatcagttggttctacagatggagtaggtgcaacaattttttgttctacacatgtatgtactggagccattgttttaactataatggtgcttgtatcgaaaaactttaatgcagatagcggaagctcttcgccgcgactttctacgtcgtaattgggttctaacgccgatctctgaatggatactagttttctaagttctaatgtgattctctgaaaatgtaaatccaattcctccggcattatagatgtgtatacatcggtaaataaaactatagtatccaacgatcccttctcgcaaattctagtcttaaccaaaaaatcgtatataaccacggagatggcgtatttaagagtggattcttctaccgttttgttcttggatgtcatataggaaactataaagtccgcactactgttaagaatgattactaacgcaactatatagtttaaattaagcattttggaaacataaaataactctgtagacgatacttgactttcgaataagtttgcagacaaacgaagaaagaacagacctctcttaatttcagaagaaaactttttttcgtattcctgacgtctagagtttatatcaataagaaagttaagaattagtcggttaatgttgtatttcattacccaagtttgagatttcataatattatcaaaagacatgataatattaaagataaagcgctgactatgaacgaaatagctatatggttcgctcaagaatatagtcttgttaaacgtggaaacgataactgtatttttaatcacgtcagcggcatctaaattaaatataggtatatttattccacacactctacaatatgccacaccatcttcataataaataaattcgttagcaaaattattaattttagtgaaatagttagcgtcaactttcatagcttccttcaatctaatttgatgctcacacggtgcgaattccactctaacatcccttttccatgcctcaggttcatcgatctctataatatctagttttttgcgtttcacaaacacaggctcgtctctcgcgatgagatctgtatagtaactatgtaaatgataactagatagaaagatgtagctatatagatgacgatcctttaagagaggtataataactttaccccaatcagatagactgttgttatggtcttcggaaaaagaatttttataaatttttccagtattttccaaatatacgtacttaacatctaaaaaatccttaatgataataggaatggataatccgtctattttataaagaaatacatatcgcacattatacttttttttggaaatgggaataccgatgtgtctacataaatatgcaaagtctaaatattttttagagaatcttagttggtccaaattcttttccaagtacggtaatagatttttcatattgaacggtatcttcttaatctctggttctagttccgcattaaatgatgaaactaagtcactatttttataactaacgattacatcacctctaacatcatcatttaccagaatactgatcttcttttgtcgtaaatacatgtctaatgtgttaaaaaaaagatcatacaagttatacgtcatttcatctgtggtattcttgtcattgaaggataaactcgtactaatctcttctttaacagcctgttcaaatttatatcctatatacgaaaaaatagcaaccagtgtttgatcatccgcgtcaatattctgttctatcgtagtgtataacaatcgtatatcttcttctgtgatagtcgatacgttataaaggttgataacgaaaatatttttatttcgtgaaataaagtcatcgtaggattttggacttatattcgcgtctagtagatatgcttttatttttggaatgatctcaattagaatagtctctttagagtccatttaaagttacaaacaactaggaaattggtttatgatgtataatttttttagtttttatagattctttattctatacttaaaaaatgaaaataaatacaaaggttcttgagggttgtgttaaattgaaagcgagaaataatcataaattatttcattatcgcgatatccgttaagtttgtatcgtaatggcgtggtcaattacgaataaagcggatactagtagcttcacaaagatggctgaaatcagagctcatctaaaaaatagcgctgaaaataaagataaaaacgaggatattttcccggaagatgtaataattccatctactaagcccaaaaccaaacgagccactactcctcgtaaaccagcggctactaaaagatcaaccaaaaaggaggaagtggaagaagaagtagttatagaggaatatcatcaaacaactgaaaaaaattctccatctcctggagtcagcgacattgtagaaagcgtggccgctgtagagctcgatgatagcgacggggatgatgaacctatggtacaagttgaagctggtaaagtaaatcatagtgctagaagcgatctctctgacctaaaggtggctaccgacaatatcgttaaagatcttaagaaaattattactagaatctctgcagtatcgacggttctagaggatgttcaagcagctggtatctctagacaatttacttctatgactaaagctattacaacactatctgatctagtcaccgagggaaaatctaaagttgttcgtaaaaaagttaaaacttgtaagaagtaaatgcgtgcacttttttataaagatggtaaactctttaccgataataattttttaaatcctgtatcagacgataatccagcgtatgaggttttgcaacatgttaaaattcctactcatttaacagatgtagtagtatatgaacaaacgtgggaggaggcgttaactagattaatttttgtgggaagtgattcaaaaggacgtagacaatacttttacggaaaaatgcatgtacagaatcgcaacgctaaaagagatcgtatttttgttagagtatataacgttatgaaacgaattaattgttttataaacaaaaatataaagaaatcgtccacagattccaattatcagttggcggtttttatgttaatggaaactatgttttttattagatttggtaaaatgaaatatcttaaggagaatgaaacagtagggttattaacactaaaaaataaacacatagaaataagtcccgatgaaatagttatcaagtttgtaggaaaggacaaagtttcacatgaatttgttgttcataagtctaatagactatataaaccgctattgaaactgacggatgattctagtcccgaagaatttctgttcaacaaactaagtgaacgaaaggtatacgaatgtatcaaacagtttggtattagaatcaaggatctccgaacgtatggagtcaattatacgtttttatataatttttggacaaatgtaaagtccatatctcctcttccgtcaccaaaaaagttaatagcattaactatcaaacaaactgctgaagtggtaggtcatactccatcaatttcaaaaagagcttatatggcaacgactattttagaaatggtaaaggataaaaattttttagatgtagtatctaaaactacgttcgatgaattcctatctatagtcgtagatcacgttaaatcatctacggatggatgatatagatctttacacaaataattacaagaccgataaatggaaatggataagcgtatgaaatctctcgcaatgacagctttcttcggagagctaagcacattagatattatggcattgataatgtctatatttaaacgccatccaaacaataccattttttcagtggataaggatggtcagtttatgattgatttcgaatacgataattataaggcttctcaatatttggatctgaccctcactccgatatctggagatgaatgcaagactcacgcatcgagtatagccgaacaattggcgtgtgcggatattattaaagaggatattagcgaatatatcaaaactactccccgtcttaaacgatttataaaaaaataccgcaatagatcagatactcgtatcagtcgagatacagaaaagcttaaaatagctctagctaaaggcatagattacgaatatataaaagacgcttgttaataagtaaatgaaaaaaaactagtcgtttataataaaacacgatatggatgccaacgtagtatcattttctactattgcgacgtatatagacgctttagcgaagaatgcttcggaattagaacagaggtctaccgcatacgaaataaataatgaattggaactagtatttattaagccgccattgattactttgacaaatgtagtgaatatctctacgattcaggaatcgtttattcgatttaccgttactaataaggaaggtgttaaaattagaactaagattccattatctaaggtacatggtctagatgtaaaaaatgtacagttagtagatgctatagataacatagtttgggaaaagaaatcattagtgacggaaaatcgtcttcacaaagaatgcttgttgagactatcgacagaggaacgtcatatatttttggattacaagaaatatggatcctctatccgactagaattagtcaatcttattcaagcaaaaacaaaaaactttacgatagactttaagctaaaatattttctaggatccggtgcccagtctaaaagttctttgttgcacgctattaatcatccaaagtcaaggcctaatacatctctggaaatagaattcacacctagagacaatgaaacagttccatatgatgaactaataaaggaattgacgactctctcgcgtcatatatttatggcttctccagagaatgtaattctttctccgcctattaacgcgcctataaaaacctttatgttgcctaaacaagatatagtaggtttggatctggaaaatctatatgccgtaactaagactgacggcattcctataactatcagagttacatcaaacgggttgtattgttattttacacatcttggttatattattagatatcctgttaagagaataatagattccgaagtagtagtctttggtgaggcagttaaggataagaactggaccgtatatctcattaagctaatagagcctgtgaatgcaatcaatgatagactagaagaaagtaagtatgttgaatctaaactagtggatatttgtgatcggatagtattcaagtcaaagaaatacgaaggtccgtttactacaactagtgaagtcgtcgatatgttatctacatatttaccaaagcaaccagaaggtgttattctgttctattcaaagggacctaaatctaacattgattttaaaattaaaaaggaaaatactatagaccaaactgcaaatgtagtatttaggtacatgtccagtgaaccaattatctttggagaatcgtctatctttgtagagtataagaaatttagcaacgataaaggctttcctaaagaatatggttctggtaagattgtgttatataacggcgttaattatctaaataatatctattgtttggaatatattaatacacataatgaagtgggtattaagtccgtggttgtacctattaagtttatagcagaattcttagttaatggagaaatacttaaacctagaattgataaaaccatgaaatatattaactcagaagattattatggaaatcaacataatatcatagtcgaacatttaagagatcaaagcatcaaaataggagatatctttaacgaggataaactatcggatgtgggacatcaatacgccaataatgataaatttagattaaatccagaagttagttattttacgaataaacgaactagaggaccgttgggaattttatcaaactacgtcaagactcttcttatttctatgtattgttccaaaacatttttagacgattccaacaaacgaaaggtattggcgattgattttggaaacggtgctgacctggaaaaatacttttatggagagattgcgttattggtagcgacggatccggatgctgatgctatagctagaggaaatgaaagatacaacaaattaaactctggaattaaaaccaagtactacaaatttgactacattcaggaaactattcgatccgatacatttgtctctagtgtcagagaagtattctattttggaaagtttaatatcatcgactggcagtttgctatccattattcttttcatccgagacattatgctaccgtcatgaataacttatccgaactaactgcttctggaggcaaggtattaatcactaccatggacggagacaaattatcaaaattaacagataaaaagacttttataattcataagaatttacctagtagcgaaaactatatgtctgtagaaaaaatagctgatgatagaatagtggtatataatccatcaacaatgtctactccaatgactgaatacattatcaaaaagaacgatatagtcagagtgtttaacgaatacggatttgttcttgtagataacgttgatttcgctacaattatagaacgaagtaaaaagtttattaatggcgcatctacaatggaagatagaccgtctacaaaaaactttttcgaactaaatagaggagccattaaatgtgaaggtttagatgtcgaagacttacttagttactatgttgtttatgtcttttctaagcggtaaataataatatggtatgggttctgatctcccagttctaaatgcattaaataattccaatagagcgatttttgttcctataggaccttccaactgtggatactctgtattgttaatagatatattaatacttttgtcgggtaacagaggttctacgtcttctaaaaataaaagttttataacatctggcctgttcataaataaaaacttggcgattctatatatactcttattatcaaatctagccattgtcttatagatgtgagctactgtaggtgtaccatttgattttctttctaatactatatatttctctcgaagaagttcttgcacatcatctgggaataaaatactactgttgagtaaatcagttattttttttatatcgatattgatggacatttttatagttaaggataataagtatcccaaagtcgataacgacgataacgaagtatttatacttttaggaaatcacaatgactttatcagattaaaattaacaaaattaaaggagcatgtatttttttctgaatatattgtgactccagatacatatggatctttatgcgtcgaattaaatgggtctagttttcagcacggcggtagatatatagaggtggaggaatttatagatgctggaagacaagttagatggtgttctacatccaatcatatatctaaagatatacccgaagatatgcacactgataaatttgtcatttatgatatttatacgtttgattcgttcaagaataaacgattggtattcgtacaggtacctccgtcgttaggagatgatagtcatttgactaatccgttattgtcaccgtattatcgtaattcagtagccagacaaatggtcaatgatatgatttttaatcaagattcatttttaaaatatttattagaacatctgattagaagccactatagagtttctaaacatataacaatagttagatacaaggataccgaagaattaaatctaacgagaatatgttataatagagataagtttaaggcgtttgtattcgcttggtttaacggcgtttcggaaaatgaaaaggtactagatacgtataaaaaggtatctaatttgatataatgaattcagtgactgtatcacacgcgccatatactattacttatcacgatgattgggaaccagtaatgagtcaattggtagagttttataacgaagtagccagttggctgctacgagacgagacgtcgcctattcctgataagttctttatacagttgaaacaaccgcttagaaataaacgagtatgtgtgtgtggtatagatccgtatccgaaagatggaactggtgtaccgttcgaatcaccaaattttacaaaaaaatcaattaaggagatagcttcatctatatctagattaaccggagtaattgattataaaggttataaccttaatataatagacggggttataccctggaattattacttaagttgtaaattaggagaaacaaaaagtcacgcgatttactgggataagatttccaagttactgctgcagcatataactaaacacgttagtgttctttattgtttgggtaaaacagatttctcgaatatacgggccaagttagaatccccggtaactaccatagtcggatatcatccagcggctagagaccgccaattcgagaaagatagatcatttgaaattatcaacgttttactggaattagacaacaaggcacctataaattgggctcaagggtttatttattaatgctttagtgaaattttaacttgtgttctaaatggatgcggctattagaggtaatgatgttatctttgttcttaagactataggtgtcccgtcagcgtgcagacaaaatgaagatccaagatttgtagaagcatttaaatgcgacgagttagaaagatatattgagaataatccagaatgtacactattcgaaagtcttagggatgaggaagcatactctatagtcagaattttcatggatgtagatttagacgcgtgtctagacgaaatagattatttaacggccattcaagattttattatcgaggtgtcaaactgtgtagctagattcgcgtttacagaatgcggcgccattcatgaaaatgtaataaaatccatgagatctaatttttcattgactaagtctacaaatagagataaaacaagttttcatattatctttttagatacgtataccactatggatacattgatagctatgaaacgaacactattagaattaagtagatcatctgaaaatccactaaccagatcgatagacactgccgtatataggagaaaaacaactcttcgggttgtaggtactaggaaaaatccaaattgcgacactattcatgtaatgcaaccaccgcatgataatatagaagattacctattcacttacgtggatatgaacaacaatagttattacttttctctacaacaacgattggaggatttagttcctgataagttatgggaaccagggtttatttcattcgaagacgctataaaaagagtttcaaaaatattcattaattctataataaactttaatgatctcgatgaaaataattttacaacggtaccactggtcatagattacgtaacaccttgtgcattatgtaaaaaacgatcgcataaacatccgcatcaactatcgttggaaaatggtgctattagaatttacaaaactggtaatccacatagttgtaaagttaaaattgttccgttggatggtaataaactgtttaatattgcacaaagaattttagacactaactctgttttattaaccgaacgaggagaccatatagtttggattaataattcatggaaatttaacagcgaagaacccttgataacaaaactaattttgtcaataagacatcaactacctaaggaatattcaagcgaattactctgtccaagaaaacgaaagactgtagaagctaacatacgagacatgttagtagattcagtggagaccgatacctatccggataaacttccgtttaaaaatggtgtattggacctggtagacggaatgttttactctggagatgatgctaaaaaatatacgtgtactgtatcaaccggatttaaatttgacgatacaaagttcgtcgaagacagtccagaaatggaagagttaatgaatatcattaacgatatccaaccattaacggatgaaaataagaaaaatagagagctatatgaaaaaacattatctagttgtttatgcggtgctaccaaaggatgtttaacattcttttttggagaaactgcaactggaaagtcgacaaccaaacgtttgttaaagtctgctatcggtgacctgtttgttgagacgggtcaaacaattttaacagatgtattggataaaggacctaatccatttatcgctaacatgcatttgaaaagatctgtattctgtagcgaactacctgattttgcctgtagtggatcaaagaaaattagatctgacaatattaaaaagttgacagaaccttgtgtcattggaagaccgtgtttctccaataaaattaataatagaaaccatgcgacaatcattatcgatactaattacaaacctgtttttgataggatagataacgcattaatgagaagaattgccgtcgtgcgattcagaacacacttttctcaaccttctggtagagaggctgctgaaaataatgacgcgtacgataaagtcaaactattagacgaggggttagatggtaaaatacaaaataatatatatagatttgcatttctatacttgttggtgaaatggtacaaaaaatatcatgttcctattatgaaactatatcctacacccgaagagattcctgactttgcattctatctcaaaataggtactctgttggtatctagctctgtaaagcatattccattaatgacggacctctccaaaaagggatatatattgtacgataatgtggtcactcttccgttgactactttccaacagaaaatatccaagtattttaattctagactatttggacacgatatagagagcttcatcaatagacataagaaatttgccaatgttagtgatgaatatctgcaatatatattcatagaggatatttcatctccgtaaatatatgctcatatatttatagaagatatcacatatctaaatgaataccggaatcatagatttatttgataatcatgttgatagtataccaactatattacctcatcagttagctactctagattatctagttagaactatcatagatgagaacagaagcgtgttattgttccatattatgggatcaggtaaaacaataatcgctttgttgttcgccttggtagcttccagatttaaaaaggtttacattctagtgccgaacatcaacatcttaaaaattttcaattataatatgggtgtagctatgaacttgtttaatgacgaattcatagctgagaatatctttattcattccacaacaagtttttattctcttaattataacgataacgtcattaattataacggattatctcgctacaataactctatttttatcgttgatgaggcacataatatctttgggaataatactggagaacttatgaccgtgataaaaaataaaaacaagattccttttttactattgtctggatctcccattactaacacacctaatactctgggtcatattatagatttaatgtccgaagagacgatagattttggtgaaattattagtcgtggtaagaaagtaattcagacacttcttaacgaacgcggtgtgaatgtacttaaggatttgcttaaaggaagaatatcatattacgaaatgcctgataaagatctaccaacgataagatatcacggacgtaagtttctagatactagagtagtatattgtcacatgtctaaacttcaagagagagattatatgattactagacgacagctatgttatcatgaaatgtttgataaaaatatgtataacgtgtcaatggcagtattgggacaacttaatctgatgaataatttagatactttatttcaggaacaggataaggaattgtacccaaatctgaaaataaataatggcgtgttatacggagaagaattggtaacgttaaacattagttccaaatttaaatactttattaatcggatacagacactcaacggaaaacattttatatacttttctaattctacatatggcggattggtaattaaatatatcatgctcagtaatggatattctgaatataatggttctcagggaactaatccacatatgataaacggcaaaccaaaaacatttgctatcgttactagtaaaatgaaatcgtctttagaggatctattagatgtgtataattctcctgaaaacgatgatggtagtcaattgatgtttttgttttcatcaaacattatgtccgaatcctatactctaaaagaggtaaggcatatttggtttatgactatcccagatactttttctcaatacaaccaaattcttggacgatctattagaaaattctcttacgccgatatttctgaaccagttaatgtatatcttttagccgccgtatattccgatttcaatgacgaagtgacgtcattaaacgattacacacaggatgaattaattaatgttttaccatttgacatcaaaaagctgttgtatctaaaatttaagacgaaagaaacgaatagaatatactctattcttcaagagatgtctgaaacgtattctcttccaccacatccatcaattgtaaaagttttattgggagaattggtcagacaatttttttataataattctcgtattaagtataacgataccaagttacttaaaatggttacatcagttataaaaaataaagaagacgctaggaattacatagatgatattgtaaacggtcacttctttgtatcgaataaagtatttgataaatctcttttatacaaatacgaaaacgatattattacagtaccgtttagactttcctacgaaccatttgtttggggagttaactttcgtaaagaatataacgtggtatcttctccataaaactgatgagatatataaagaaataaatgtcgagctttgttaccaatggatacctttccgttacattggaaccacacgagctgacgttagacataaaaactaatattaggaatgccgtatataagacgtatctccatagagaaattagtggtaaaatggccaagaaaatagaaattcgtgaagacgtggaattacctctcggcgaaatagttaataattctgtagttataaacgttccgtgtgtaataacctacgcgtattatcacgttggggatatagtcagaggaacattaaacatcgaagatgaatcaaatgtaactattcaatgtggagatttaatctgtaaactaagtagagattcgggtactgtatcatttagcgattcaaagtactgcttttttcgaaatggtaatgcgtatgacaatggcagcgaagtcactgccgttctaatggaggctcaacaaggtatcgaatctagttttgtttttctcgcgaatatcgtcgactcataaaaaagagaatagcggtaagtataaacacgaatactatggcaataattgcgaatgttttattctcttcgatatatttttgataatatgaaaaacatgtctctctcaaatcggacaaccatctcataaaatagttctcgcgcgctggagaggtagttgccgctcgtataatctctccagaataatatacttgcgtgtcgtcgttcaatttatacggatttctatagttctctgttatataatgcggtttgccctcatgattagacgacgacaatagtgttctaaatttagatagttgatcagaatgaatgtttattggcgttggaaaaattatccatacagcgtctgcagagtggttgatagttgttcctagatatgtaaaataatccaacttactaggcagcaaattgtctagataaaatactgaatcaaacggtgcagacgtattggcggatctaatggaatccaattgattaactatcttttgaaaatatacatttttatgatccaatacttgtaagaatatagaaataatgataagtccatcatcgtgtttttttgcctcttcataagaactatattttttcttattccaatgaacaagattaatctctccagagtatttgtacacatctatcaagtgattggatccataatcgtcttcctttccccaatatatatgtagtgatgataacacatattcattggggagaaaccctccacttatatatcctcctttaaaattaatccttactagttttccagtgttctggatagtggttggtttcgactcattataatgtatgtctaacggcttcaatcgcgcgttagaaattgcttttttagtttctatattaataggagatagttgttgcggcatagtaaaaatgaaatgataactgtttaaaaatagctcttagtatgggaattacaatggatgaggaagtgatatttgaaactcctagagaattaatatctattaaacgaataaaagatattccaagatcaaaagacacgcatgtgtttgctgcgtgtataacaagtgacggatatccgttaataggagctagaagaacttcattcgcgttccaggcgatattatctcaacaaaattcagattctatctttagagtatccactaaactattacggtttatgtactacaatgaactaagagaaatctttagacggttgagaaaaggttctatcaacaatatcgatcctcactttgaagagttaatattattgggtggtaaactagataaaaaggaatctattaaagattgtttaagaagagaattaaaagaggaaagtgatgaacgtataacagtaaaagaatttggaaatgtaattctaaaacttacaacacgggataaattatttaataaagtatatataagttattgcatggcgtgttttattaatcaatcgttggaggatttatcgcatactagtatttacaatgtagaaattagaaagattaaatcattaaatgattgtattaacgacgataaatacgaatatctgtcttatatttataatatgctagttaatagtaaatgaacttttacagatctagtataattagtcagattattaagtataatagacgactagctaagtctattatttgcgaggatgactctcaaattattacactcacggcattcgttaaccaatgcctatggtgtcataaacgagtatccgtgtccgctattttattaactactgataacaaaatattagtatgtaacagacgagatagttttctctattctgaaataattagaactagaaacatgtttagaaagaaacgattatttctgaattattccaattatttgaacaaacaggaaagaagtatactatcgtcatttttttctctagatccagctactactgataatgatagaatagacgctatttatccgggtggcatacccaaaaggggtgagaatgttccagagtgtttatccagggaaattaaagaagaagttaatatagacaattcttttgtattcatagacactcggttttttattcatggcatcatagaagataccattattaataaattttttgaggtaatcttctttgtcggaagaatatctctaacgagtgatcaaatcattgatacatttaaaagtaatcatgaaatcaaggatctaatatttttagatccgaattcaggtaatggactccaatacgaaattgcaaaatatgctctagatactgcaaaacttaaatgttacggccatagaggatgttattatgaatcattaaaaaaattaactgaggatgattgattaaaaaatataaattaatttaccatcgtgtatttttataacgggattgtccggcatatcatgtagatagttaccgtctacatcgtatactcgaccatctacgcctttaaatcctctatttattgacattaatctattagaattggaataccaaatattagtaccctcaattagtttattggtaatattttttttagacgatagatcgatggctcttgaaaccaaggttttccaaccggactcattgtcgatcggtgagaagtctttttcattagcatgaatccattctaatgatgtatgtttaaacactctaaacaattggacaaattcttttgatttgctttgaatgatttcaaataggtcttcgtctacagtaggcataccattagataatctagccattataaagtgcacgtttacatatctacgttctggaggagtaagaacgtgactattgagacgaatggctcttcctactatctgacgaagagacgcctcgttccatgtcatatctaaaatgaagatatcattaattgagaaaaaactaataccctcgcctccactagaagagaatacgcatgttttaatgcattctccgttagtgtttgattcttggttaaactcagccaccgccttgattctagtatcttttgttctagatgagaactctatattagagataccaaagactttgaaatatagtaataagatttctattcctgactgattaacaaatggttcaaagactagacatttaccatgggatgctaatattcccaaacatacatctataaatttgacgcttttctcttttaattcagtaaatagagagatatcagccgcactagcatcccctttcaatagttctccctttttaaaggtatctaatgcggatttagaaaactctctatctcttaatgaatttttaaaatcattatatagtgttgctatctcttgcgcgtattcgcccggatcacgattttgtctttcaggaaagctatcgaacgtaaacgtagtagccatacgtctcagaattctaaatgatgatatacctgtttttatttcagcgagtttagccttttgataaatttcttcttgctttttcgacatattaacgtatcgcattaatactgttttcttagcgaatgatgcagacccttctacgtcatcaaaaatagaaaactcgttattaactatatacgaacatagtcctcctagtttggagactaattctttttcatcgactagacgtttattctcaaatagcgattggtgttgtaaggatcctggtcgtagtaagttaaccaacatggtgaattcttgcacactattgacgataggtgtagccgataaacaaatcatcttatggttttttaacgcaatggtcttagataaaaaattatatactgaacgagtaggacggatcttaccatcttctttgattaatgatttagaaatgaagttatgacattcatcaataatgacgcatattctactcttggaattaatagttttgatattagtaaaaaatttatttctaaaattttgatcatcgtaattaataaaaatacaatccttcgttatctctggagcgtatctgagtatagtgttcatccaaggatcttctatcaaagcctttttcaccaataagataatagcccaattcgtataaatatccttaagatgtttgagaatatatacagtagtcattgttttaccgacacccgtttcatggaacaataaaagagaatgcatactgtctaatcctaagaaaactcttgctacaaaatgttgataatccttgaggcgtactacgtccgaccccatcatttcaacgggcatattagtagttctgcgtaaggcataatcgatataggccgcgtgtgatttactcatttatgagtgataagtaataactatgttttaaaaatcacagcagtagtttaactagtcttctctgatgtttgttttcgatactttttgaatcagaagtcatactagaataaagcaacgagtgaacgtaatagagagcttcgtatactctattcgaaaactctaagaacttattaatgaattccgtatccactggattgtttaaaatactaaattgaacactgttcacatccttccaagaagaagacttagtgacggacttaacatgagacataaataaatccaaattttttttacaaacatcactagccaccataatggcgctatctttcaaccagctatcgcttacgcattttagcagtctaacatttttaaagagactacaatatattctcatagtatcgattacacctctaccgaataaagttggaagtttaataatacaatatttttcgtttacaaaatcaaataatggtcgaaacacgtcgaaggttaacatcttataatcgctaatgtatagattgttttcagtgagatgattattagatttaatagcatctcgttcacgtttgaacagtttattgcgtgcgctgaggtcggcaactacggcgtccgctttagtactcctcccataatactttacgctattaatctttaaaatttcatagactttatctagatcgctttctggtaacatgatatcatgtgtaaaaagttttaacatgtcggtcggcattctatttagatcattaactctagaaatctgaagaaagtaattagctccgtattccagactaggtaatgggcttttacctagagacagattaagttctggcaatgtttcataaaatggaagaaggacatgcgttccctcccggatattttttacaatttcatccatttacaactctatagtttgttttcattattattagttattatctcccataatcttggtaatacttaccccttgatcgtaagataccttatacaggtcattacatacaactaccaattgtttttgtacataatagattggatggttgacatccatggtggaataaactactcgaacagatagtttatctttccccctagatacattagccgtaatagttgtcggcctaaagaatatctttggtgtaaagttaaaagttagggttcttgttccattattgctttttgtcagtagttcattataaattctcgagatgggtccgttctctgaatatagaacatcatttccaaatctaacttctagtctagaaataatatcggtcttattcttaaaatctattcccttgatgaagggatcgttaatgaacaaatccttggcctttgattcggctgatctattatctccgttatagacgttacgttgactagtccaaagacttacaggaatagatgtatcgatgatgttgatactatgtgatatgtgagcaaagattgttctcttagtggcatcactatatgttccagtaatggcggaaaactttttagaaatgttatatataaaagaattttttcgtgttccaaacattagcagattagtatgaagataaacactcatattatcaggaacattatcaatttttacatacacatcagcatcttgaatagaaacgataccatcttctggaacctctacgatctcggcagactccggataaccagtcggtgggccatcgctaacaataactagatcatccaacaatctactcacatatgcatctatataatctttttcatcttgtgagtaccctggatacgaaataaatttattatccgtatttccataataaggtttagtataaacagagagagatgttgccgcatgaacttcagttacagtcgccgttggttggtttatttgacctattactctcctaggtttctctataaacgatggtttaatttgtacattcttaaccatatatccaataaagctcaattcaggaacataaacaaattctttgttgaacgtttcaaagtcgaacgaagagtcacgaataacgatatcggatactggattgaaggttaccgttacggtaatttttgaatcggatagtttaagactgctgaatgtatcttccacatcaaacggagttttaatataaacgtatactgtagatggttctttaatagtgtcattaggagttaggccaatagaaatatcattaagttcactagaatatccagagtgtttcaaagcaattgtattattgatacaattattatataattcttcgccctcaatttcccaaataacaccgttacacgaagagatagatacgtgattaatacatttatatccaacatatggtacgtaactgaatcttcccatacctttaacttctggaagttccaaactcagaaccaaatgattaagcgcagtaatatactgatccctaatttcgaagctagcgatagcctgattgtctggaccatcgtttgtcataactccggatagagaaatatattgcggcatatacaaagttggaatttgactatcgactgcgaagacattagaccgtttaatagagtcatccccaccgatcaaagaattaatgatagtattattcattttctatttaaaatggaaaaagcttacaataaactccgtagagaaatatctataatttgtgagttttccttaaagtaacagcttccgtaaacgccgtctttatctcttagtaggtttattgtatttatgaccttttccttatcttcatagaatactaaaggcaacaaagaaatttttggttcttctctaagagctacgtgagacttaaccatagaagccaacgaatccctacatattttagaacagaaataccctacttcaccacccttgtatgtctcaatactaataggtctaaaaaccaaatcttgattacaaaaccaacacttatcaattacactatttgtcttaatagacacatctgccatagatttataatactttggtagtatacaagcgagtgcttcttctttagcgggcttaaagactgctttaggtgctgaaataaccacatctggaaggcttactcgcttagccatttaattacggaactatttttttatacttctaatgagcaagtagaaaacctctcatctacaaaaacgtactcgtgtccataatcctctaccatagttacacgttttttagatctcatatgtgctaaaaagttttcccatactaattggttactattatttttcgtataatttttaacagtttgaggttttagatttttagttacagaagtgatatcgaatattttatccaaaaagaatgaataattaattgtcttagaaggagtgttttcttggcaaaagaataccaagtgcttaaatatttctactacttcattaatcttttctgtactcagattcagtttctcatcttttacttgattgattatttcaaagactaacttataatcctttttatttattctctcgttagccttaagaaaactagatacaaaatttgcatctacatcatccgtggatatttgatttttttccatgatatccaagagttccgagataatttctccagaacattgatgagacaataatctccgcaatacatttctcaaatgaataagtttattagacacgtggaagtttgactttttttgtacctttgtacatttttgaaataccgactcgcaaaaaatacaatattcatatccttgttcagatactataccgttatgtctacaaccgctacataatcgtagattcatgttaacactctacgtatctcgtcgtccaatattttatataaaaacattttatttctagacgttgccagaaaatcctgtaatatttttagttttttgggctgtgaataaagtatcgccctaatattgttaccgtcttccgccaatatagtagttaaattatccgcacatgcagaagaacaccgcttaggcggattcagtacaatgttatatttttcgtaccaactcatttaaatatcataatctaaaatagttctgtaatatgtctagcgctaatatattgatcataatcctgtgcataaattaagatacaacaatgtctcgaaatcatcgacatggcttcttccatagttagaagatcgtcgtcaaagttagcaacgtgattcatcaacatttgctgttttgaggcagcaaatactgaaccgtcgccattcaaccattcataaaaaccatcgtctgaatccattgataatttcttgtactggtttttgagagctcgcatcaatctagcatttctagctcccggattgaaaacagaaagaggatcgtacatccagggtccattttctgtaaatagaatcgtataatgtcccttcaagaagatatcagacgatccacaatcaaagaattggtctccgagtttgtaacaaactgcggactttaacctatacatgataccgtttagcataatttctggtgatacgtcaatcggagtatcatctattagagatctaaagccggtgtaacattctccaccaaacatattcttattctgacgtcgttctacataaaacatcattgctccattaacgataacaggggaatgaacagcactacccatcacattagttcccaatggatcaatgtgtgtaactccagaacatcttccatagcctatgttaggaggagcgaacaccactcttccactattgccatcgaatgccatagaataaatatccttggaattgatagaaatcggactgtcggatgttgtgatcatcttcataggattaacaactatgtatggtgccgcctgaagtttcatatcgtaactgatgccgtttataggtctagccacagaaaccaacgtaggtctaaatccaactatagacaaaatagaagccaatatctgttcctcatctgtcataacttgagagcatccagtatgaataatcttcattagatggggatctaccgcatcatcatcgttacaataaaaaattcccattctaatgttcataattgcttttctaatcatggtatgcatgtttgctctctgaatctctgtggaaattagatctgatacacctgtaatcactatcggattatcctccgtaagacgattaaccaacaacatataattataagactttacttttctaaattcataaagttgctggattaggctataggtgtctccatgtacatacgcgttctcgagcgcaggaagtttaataccgaatagtgccatcagaataggatgaatatagtaattagtttctggttttctataaataaaagacaaatcttgtgaactagacatatcggtaaaatgcatggattggaatcgtgtagtcgacagaagaatatgatgattagatggagagtatattttatctaactctttgagttggtcaccgattctaggactagctcgagaatgaataagtactaaaggatgagtacatttcacagaaacactagcattgttcaatgtgctctttacatgggtaaggagttgaaatagctcgtttctatttgttctgacaatatttagtttattcataatgttaagcatatcctgaatagtaaagttagatgtgtcatacttgttagtagttagatatttagcaattgcattcccatcatttctcaatctcgtactccaatcatgcgtggatgctacttcgtcgatggaaaccatacaatcctttttgataggctgttgagattgatcatttcctgcacgtttaggtttggtacgttgatttctagcccctgcggatataaagtcatcgtctacaatttgggacaatgaattgcatacactacaagacaaagatttatcagaagtgtgaatatgatcttcatctaccaaagaaagagtttgattagtataactagattttagtcctgcgttagatgttaaaaaaacatcgctattgaccacggcttccattatttatattcgtagtttttactcgaaagcgtgattttaatatccaatcttattacttttggaatcgttcaaaacctttgactagttgtagaatttgatctattgccctacgcgtatactcccttgcatcatatacgttcgtcaccagatcgtttgtttcggcctgaagttggtgcatatctctttcaacattcgacatgagatccttaagggccatatcgtctagattttgttgagatgctgctcctggatttggattttgttgtgctgttgtacatactgtaccaccagtaggtgtaggagtacatacagtggccacaataggaggttgagaaagtgtaaccgttggagtagtacaagaaatacttccatccgattgttgtgtacatgtagttgttggtaacgtctgagaaggttgggtagatggcggcgtcgtcgttttttgatctttattaaatttagagataatatcctgaacagcattgctcggcgtcaacgctggaaggagtgaactcgccggcgcatcagtatcttcagacagccaatcaaaaagattagacatatcagatgatgtattagtttgttgtcgtggttttggtgtaggagcagtactactaggtagaagaataggagccgatgtagctgttggaaccggctgtggagttatatgaatagttggttgtagcggttggataggctgtctgctggcggccatcatattatctctagctagttgttctcgcaactgtctttgataatacgactcttgagactttagtcctatttcaatcgcttcatcctttttcgtatccggatccttttcttcagaataatagattgacgactttggtgtagaggattctgccagcctctgtgagaacttgttaaagaagtccatttaaggctttaaaattgaattgcgattataagattaaatggcagacacagacgatattatcgactatgaatccgatgatctcaccgaatacgaggatgatgaagaagaggaagaagatggagagtcactagaaactagtgatatagatcccaaatcttcttataagattgtagaatcagcatccactcatatagaagatgcgcattccaatcttaaacatatagggaatcatatatctgctcttaaacgacgctatactagacgtataagtctatttgaaatagcgggtataatagcagaaagctataacttgcttcaacgaggaagattacctctagtttcagaattttctgacgaaacgatgaagcaaaatatgctacatgtaattatacaagagatagaggagggttcttgtcctatagtcatcgaaaagaacggagaattgttgtcggtaaacgattttgacaaagatggtctaaaattccatctagactatattatcaaaatttggaaacttcaaaaacgatattagaatttatacgaatatcgttctctaaatgtcacaatcaagtctcgcatgttcagcaatttattgtcgtactttatatcgtgttcattaacgatatcttgcaaaatagtaatgattctatcttccttcgatagatattcttcagagattattgtcttatattctttcttgttatcagatatgaatttgataagactttgaacattattgatacccgtctgtttaattttttctacagatattttagttttggcagattctatcgtatctgtcaatagacatccaacatcgacattcgacgtcaattgtctataaatcaacgtataaattttagaaataacattagcgaattgttgtgcgttgatgtcgttattctgaaacagtatgattttaggtagcattttcttaacaaagagaacgtatttattgttactcagttgaacagatgatatatccagattactaacgcatctgattccgtataccaaactttcagaagaaatggtatacaattgtttgtattcattcaatgtctctttttcagaaattagtttagagtcgaatactgcaataattttcaagagatagttttcatcagataagattttatttagtgtagatatgataaaactattgttttgttggagaacttgatacgccgcgttctctgtagtcgacgctctcaaatgggaaacaatctccattatttttttggaatcggatactatatcttcggtatcttgacgcagtctagtatacatagagttaagagagattagagtttgtacattaagcaacatgtctctaaatgtggctacaaacttttcctttttcacatcatctagtttattatataccgatttcacaacggcaccagatttaaggaaccagaatgaaaaactctgataactacaatatttcatcatagttacgattttatcatcttctatagttggtgtaatagcgcatacctttttctccaagactggaaccaacgtcataaaaatgtttaaatcaaaatccatatcaacatctgatgcgctaagaccagtctcgcgttcaagattatctttactaatggtgacgaactcatcgtataaaactctaagtttgtccattatttatttacagatttagttgtttaatttatttgtgctcttccagagttgggatagtatttttctaacgtcggtattatattattaggatctacgttcatatgtatcataatattaatcatccacgttttgataaatctatctttagcttctgaaataacgtatttaaacaaaggagaaaaatatttagctacggcatcagacgcaataacattttttgtaaatgtaacgtatttagacgacagatcttcgttaaaaagttttccatctatgtagaatccatcggttgttaacaccattcccgcgtcagattgaataggagtttgaatagtttgttttggaaatagatccttcaataacttatagttgggtgggaaaaaatcgattttatcactagactctttcttttttactatcattacctcatgaactatttcttgaatgagtatatgtattttctttcctatatcggacgcgttcattggaaaatataccatgtcgttaactataagaatatttttatcctcgtttacaaactgaataatatcagatgtagttcgtaaacgaactatatcatcaccagcacaacatctaactatatgatatccactagtttcctttagccgtttattatcttgttccatattagcagtcattccatcatttaagaaggcgtcaaaaataatagggagaaatgacattttggattctgttacaactttaccaaaattaaggatatacggacttactatctttttctcaacgtcaatttgatgaacacacgatgaaaatgtgcttctatgagattgatcatgtagaaaacaacaagggatacaatatttccgcatatcatgaaatatattaagaaatcccaccttattatatttccccaaaggatccatgcacgtaaacattatgccgttatcattaataaagacttctttctcatcggatctgtaaaagttgttactgatttttttcattccaggatctagataattaataatgatgggttttctattcttattctttgtattttggcatatcctagaccagtaaacagtttccactttggtaaaatcagcagacttttgaacgctattaaacatggcattaatggcaataactaaaaatgtaaaatatttttctatgttaggaatatggtttttcactttaatagatatatggtttttggccaaaatgatagatatttttttatccgaggatagtaaaatattattagtcgccgtctctataaaaatgaagctagtctcgatatccaattttattctagaattgataggagtcgccaaatgtaccttatacgttatatctcccttgatgcgttccatttgtgtatctatatcggacacaagatctgtaaatagttttacgttattaatcatcacggtatcgccgtcgctagataacgctaatgtaccatccaagtcccaaatggagagatttaactgttcatcgtttagaataaaatgattaccggtcatattaataaagtgttcatcgtatctagataacaacgacttataattaatgtccaagtcttgaactcgctgaatgatcttttttaacccagttagttttagattggtacgaaatatattgttaaactttgattctacagtaatgtccaaatctagttgtggaaatacttccatcaacattgtttcaaacttgataatattattatctacatcttcgtacgatccaaattccggaatagatgtatcgcacgctctggccacccagataaccaaaaagtcacacgctccaggatatacattgtataaaaagctatcgttttttagtagggtttttttctgcgtgtatacgaagggattaaaaatagtattatcaacgtaactatattccaaattattcttatgagaatagataataatatcgtccttaatatctaacaaatttcctaaatatccctttaattgagtcattcgaagcgtcaatagaatatgtctcttaactatttccggctgttgtatatttaaatgacttcgtaaaaaataatatatgggcgacttctcatctatgtaatcatatggagtgagatatagggctcgttctacctcctgccccttacccacctgtaataccaattgcggacttactatatatcgcatatttatatcgtggggtaaagtgaaaatctactaccgatgatgtaagtcttacaatgttcgaaccagtaccagatcttaatttggaggcctccgtagaactaggggaggtaaatatagatcaaacaacacctatgataaaggagaatagcggttttatatcccgcagtagacgtctattcgcccatagatctaaggatgatgagagaaaactagcactacgattctttttacaaagactttattttttagatcatagagagattcattatttgttcagatgcgttgacgctgtaaaagacgtcactattaccaaaaaaaataacattatcgtggcgccttatatagcacttttaactatcgcatcaaaaggatgcaaacttacagaaacaatgattgaagcattctttccagaactatataatgaacatagtaagaaatttaaattcaactctcaagtatccatcatccaagaaaaactcggataccagtttggaaactatcacgtttatgattttgaaccgtattactctacagtagctctggctattcgagatgaacattcatctggcatttttaatatccgtcaagagagttatctggtaagttcattatctgaaataacatatagattttatctaattaatctaaaatctgatcttgttcaatggagtgctagtacgggcgctgtaattaatcaaatggtaaatactgtattgattacagtgtatgaaaagttacaactggtcatagaaaatgattcacaatttacatgttcattggctgtggaatcaaaacttccaataaaattacttaaagatagaaatgaattatttacaaaattcattaacgagttaaaaaagaccagttcattcaagataagcaaacgcgataaggatacgctactaaaatattttacttaggactggagttagaatttatagacgactcatttcgtttatcattgttactattattactattactatcattattagtgttggcattattagtattcttcttgtcatcttgttcagaaatatacagcaatgctatacctaatactaaatacattatcatgctcgcaatggctctaacaacaacgaaccaaaatgaatttggtcgtagcttttgttcacaaaaatacataaagaaatgtctacataaatctatggcgccattggctacttgaaatagcgccagtcctcctacagattttaatatagctgtataacatgacatttattcatcatcaaaagagacagagtcaccatctgtcatatttagattttttttcatgtgttcaaagtatcctctactcatttcattataatagtttatcatacttagaattttaggacggatcaatgagtaagacttgactagatcgtcagtagtaatttgtgcatcgtctattctgcatccgcttcgtcgaataatgtatagcatcgctttgagattctccatagctatcaagtctttatacaatgacatggaaatatctgtgaatactttatacttctccaacatcgatgccttaacatcatcgcctactttagcattgaaaatacgttctattgtgtagatggatgtagcaagatttttaaacaacaatgccatcttacacgatgattgcctcaagtctccaatcgtttgtttagaacgattagctacagagtccaatgcttggctgactagcatattattatctttagaaattgtattcttcaatgaggcgtttatcatatctgtgatttcgttagtcatattacagtctgactgggttgtaatgttatccaacatatcacctatggatacggtacacgtaccagcatttgtaataatcctatctaagatgttgtatggcattgcgcagaaaatatcttctcctgtaatatctccactctcgataaatctactcagattattcttaaatgccttattctctggagaaaagatatcagtgtccatcatttcattaatagtatacgcagaaaagataccacgagtatcaattctatccaagatacttatcggttccgagtcacagataatggtttcctctccttcgggagatcctgcatagaaatatctaggacaatagtttctatactgtctgtaactctgataatctctaaagtcactaactgataccatgaaattgagaagatcaaacgctgaagtaattaatttttctgcctcgtttttactacaactagttttcatcaatgtagtgacgatgtattgtttagttacttttggtctaatactgatgatagagatattattgcttcccataatggatcttctagtagtcaccttaaagcccattgatgcgaatagcagatagataaagtcttggtatgactcctttctaatatagtacggactacctttgtcacccaactttatacccacataagccataacaacctctttaatagccgtttcatgaggtttatcagccatgagcctgagtagttggaagaatctcatgaatcccgtctcagaaagtcctatatgcatgatagatttatctttcctgggaaactctcgtatagtcatagatgaaatactctttaaagtttctgaaataagattagtaacagtcttacctccgactactctaggtaacaaacaaactctaataggtgttttctctgcggagataatatcagaaaggatagagcaataagtagtattattgtgattataaagaccgaatacataacaggtagaatttataaacatcatgtcctgaaggtttttagacttgtattcctcgtaatccataccgtcccaaaacatggatttggtaactttgatagccgtagatctttgttccttcgccaacaggttaaagaaattaataaagaatttgttgtttctatttatgtccacaaattgcacgtttggaagcgccacggttacattcactgcagcattttgaggatcgcgagtatgaagtacgatgttattgtttactggtatatctggaaagaaatctaccagtctaggaataagagattgatatcgcatagaaatagtaaagtttataatctcatcatcgaagagcattttgttaccattgtaataaatatccactctgtcatatgtataaatgaagtactgttcaaacatgatgagatgtttatatgttggcatagtagtgagatcgacgtttggtaatggcaatgtattaagattaactccataatgtctagcagcatctgcgatgttataagcgtcgtcaaagcggggtcgatcttgtattgttatatattgtctaacacctataagattatcaaaatcttgtctgcttaatacaccgttaacaatttttgccttgaattcttttattggtgcattaataacatccttatagaggatgttaaacaaataagtgttatcaaagttaagatctggatatttcttttctgctagaacatccattgagtcggagccatctggtttaatataaccaccgataaatctagctctgtattctgtatccgtcaatctaatattaagaaggtgttgagtgaaaggtggaagatcgtaaaagctgtgagtattaatgataggattagtttccgaactaatgttaattggggtattaataatatctatatttccagcgttaagtgtaacattaaacagttttaattcacgtgacgtggtatcaattaaataattaatgcccaatttggatatagcagcctgaagctcatcttgtttagttacggatcctaatgagttattaagcaatatatcgaacggatgaacgaaggttgttttaagttggtcacatactttgtaatctagacatagatgcggaagaacggtagaaactatacgaaataaatattcagagtcctctaattgatcaagagtaactattgacttaataggcatcatttatttagtattaaatgacgaccgtaccagtgacggatatacaaaacgatttaattacagagttttcagaagataattatccatctaacaaaaattatgaaataactcttcgtcaaatgtctattctaactcacgttaacaacgtggtagatagagaacataatgccgccgtagtgtcatctccagaggaaatatcctcacaacttaatgaagatctatttccagatgatgattcaccggccactattatcgaacgagtacaacctcatactactattattgacgatactccacctcctacgtttcgtagagagttattaatatcggaacaacgtcaacaacgagaaaaaagatttaatattacagtatcgaaaaatgctgaagcaataatggaatctagatctatgataacttctatgccaacacaaacaccatccttgggagtagtttatgataaagataaaagaattcagatgttagaggatgaagtggttaatcttagaaatcaacgatctaatacaaaatcatctgataatttagataattttaccaaaatactatttggtaagactccgtacaaatcaacagaagttaataagcgtatagccatcgttaattatgcaaatttgaacgggtcccccttatcagtcgaggacttggatgtttgttcggaggatgaaatagatagaatctataaaacgattaaacaatatcacgaaagtagaaaacgaaaaattatcgtcactaacgtgattattattgtcataaacattatcgagcaggcattgctaaaactcggatttgaagaaatcaaaggactgagtaccgatatcacttcagaaattatcgatgtggagatcggagatgactgcgatgctgtagcatctaaactaggaatcggtaacagtccggttcttaatattgtattgtttatactcaagatattcgttaaacgaattaaaattatttaatttaatacattcccatatccagacaacaatcgtctggattaatctgttcctgtcgtctcataccggacgacatattaatctttttattagtgggcatctttttagatggtttctttttcccagcattaactgagtcgatacctagaagatcgtgattgatctctccgaccattccacgaacttctaattggccgtctctgacggtaccataaactattttaccagcattagtaacagcttggacaatctgaccatccatcgcattgtacgatgtagtagtaactgttgttctacgtctaggagcaccagaagtatttttggagcccttggatgttgatgtagaagaagacgaggattttgattttggtttacatgtaatacattttgaactctttgattttgtatcacatgcgccggcagtcacatctgtttgagaattaagattattgttgcctcctttgacggctgcatctccaccgatttgcgctagtagatttttaagctgtggtgtaatcttattaactgtttcgatataatcatcgtaactgcttctaacggctaaattttttttatccgccatttagaagctaaaaatatttttatttatgcagaagatttaactagattatacaatgaactaatatgatccttttccagattatttacaaacttggtattttttggttctggaggaggcgaatttaaattcggacttggattcggattttgtaagttcttgatcttattatacatcgagtataggatggcgacagtaactgctacacaaataccgatcaaaagaagaataccaatcatttattgacaataacttcactattgatcaagtatgcaatatatcatcttttcactaaataagtagtaataatgattcaacaatgtcgagatatatggacgataataatttagttcatggaaatatcgctatgattggtgtgaatgactccgctaactctgtggggtgcgcagtgctttccccacatagaataaattagcattccgactgtgataataataccaagtataaacgccataatactcaatactttccatgtacgagtgggactggtagacttactaaagtcaataaaggcgaagatacacgaaagaatcaaaagaatgattccagcgattagcacgccggaaaaataatttccaatcataagcatcatgtccatttaactaataaaaattttaaatcgccgaatgaacaaagtggaatataaaccatataaaaacaatagtttgtactgcaaaaataatatctatttttgttttcgaagatatggtaaaattaaatagtagtacacagcatgttataactaacagcagcaacggctcgtaattacttatcatttactagacgaaaaggtggtgggatattttcttgctcaaataatacgaatatatcacccatccattttatgcgatgtttatatactctaatctttaatagatctatagacgacgggtttaccaacaatatagattttatcgattcatctaatttaaacccttccttaaacgtgaatgatctattatctggcataacgatgaccctacctgatgaatcggacaatgtactgggccatgtagaataaattatcaacgaattatcgtctacgaacatttatatcatttgttttaattttaggacgcgaataaatggatataaaatagaaaataacagatattacaaccagtgttatggccgcgcccaaccaggtaggcagttttattttatcttttactacaggttctcctggatgtacgtcaccaacggcggacgtagttctagtacaattagacgtaagttccgcttgggaattttttaacgctaaagagttaacgttaatcgtgcacccaacgtatttacatctagttcgttgaacatcttgattataatataaccattttctatctctagattcgtcagtgcactcatgtaaccaacataccctaggtcctaaatatttatctccggaattagattttggataattcgcgcaccaacaatttctatttcctttatgatcgttacaaaagacgtataatgccgtatccccaaaagtaaaataatcaggacgaataattctaataaactcagaacaatatctcgcatccatatgtttggagcaaatatcggaataagtagacatagccggtttccgttttgcacgtaaccattctaaacaattggggtttccaggatcgtttctacaaaatccagtcatgaaatcgtcacaatgttctgtcttgtaattattattaaatatttttggacagtgtttggtatttgtcttagaacaacattttgccacgctatcactatcgcccaggagataatccttttttataaaatgacatcgttgcccggatgctatataatcagtagcgtgttttaaatccttaatatattcaggagttacctcgttctgataatagattaatgatccaggacgaaatttgaaagaactacatggttctccatgaattaatacatattgtttagcaaattcaggaactataaaactactacaatgatctatcgacataccatctatcaaacaaaacttgggtttaatttctcccggagatgtttcataatagtacgtataactttcttctgcaaacttaacagctctattatattcaggataattaaaacctaattccatatatttgtctcgtatatctgctattcctggtgctattttgattctattaagagtaacagctgcccccattcttaataatcgtcagtatttaaactgttaaatgttggtatatcaacatctaccttatttcccgcagtataaggtttgttgcaggtatactgttcaggaatggttacatttatacttcttctatagtcctgtctttcgatgttcatcacatatgcaaagaacagaataaacaaaataatgtaagaaataatattaaatatctgtgaattcgtaaatacattgattgccataataattacagcagctacaatacacacaatagacattcccacagtgttgccattacctccacgatacatttgagttactaagcaataggtaataactaagctagtaagaggcaatagaaaagatgagataaatatcatcaatatagagattagaggagggctatatagagccaagacgaacaaaatcaaaccgagtaacgttctaacatcattatttttgaagattcccaaataatcattcattcctccataatcgttttgcatcatacctccatctttaggcataaacgattgctgctgttcctctgtaaataaatctttatcaagcactccagcacccgcagagaagtcgtcaagcatattgtaatatcttaaataactcatttatatattaaaaaatgtcactattaaagatggagtataatctttatgccgaactaaaaaaaatgacttgtggtcaacccctaagtctttttaacgaagacggggatttcgtagaagttgaaccgggatcatcctttaagtttctgatacctaagggattttacgcctctccttccgtaaagacgagtctagtattcgagacattaacaacgaccgataataaaatcactagtatcaatccaacaaatgcgccaaagttatatcctcttcaacgcaaagtcgtatctgaagtagtttctaatatgaggaaaatgatcgaatcaaaacgtcctctatacatcactcttcacttggcgtgtggatttggtaagactattaccacgtgttatcttatggctacacacggtagaaaaaccgtcatttgcgtacccaataaaatgttaatacatcaatggaagacacaggtagaggcagtcggattggaacataagatatccatagatggagtaagtagtctattaaaggaactaaagactcaaagtccggatgtattaatagtagtcagtagacatctgacaaacgatgccttttgtaaatatatcaataagcattatgatttgttcatcttggatgaatcacatacgtataatctgatgaacaatacagcagttacaagatttttagcgtattatcctccgatgatgtgttattttttaactgctacacctagaccatctaaccgaatttattgtaacagtattattaatattgccaagttatccaatctaaaaaaaactatctatgcagtagatagtttttttgagccatattccacagataatattagacatatggtaaaacgactagatggaccatctaataaatatcatatatataccgagaagttattatctgtagacgagcctagaaatcaacttattcttgataccctggtagaagaattcaagtcaggaactattaatcgcattttagttattactaaactacgtgaacatatggtattattctacaaacgattattagattttttcggaccagaggttgtatttataggagacgcccaaaatagacgtactccagatatggtcaaatcaatcaaggaactaaatagatttatattcgtatccaccttattttattccggtactggtttagatattcctagtttggattcgttgttcatttgctcggcagtaatcaacaatatgcaaatagagcaattactagggagggtatgtcgagaaacagaactattagataggacggtatatgtatttcctaacacatccatcaaagaaataaagtacatgataggaaatttcatgcaacgaattattagtctgtctgtagataaactaggatttaaacaaaaaagttatcggaaacatcaagaatccgatcccacttctgcatgtacaacatcatccagagaagaacgtgtattaaatagaatatttaactcgcaaaatcgttaagaagtttaagcgacgatccgcatgctgcgcaggccagtgtattacccctcatagtattaatataatccaatgatacttttgtgatgtcggaaatcttaaccaatttagactgacaggcagaacacgtcatgcaatcatcatcgtcatcgataactgtagtcttgggcttctttttgcgactcttcattccggaacgcacattggtgctatccatttaggtagtaaaaaataagtcagaatatgccctataacacgatcgtgcaaaacctggtatatcgtctctatctttatcacaatatagtgtatcgacatttttattattattgacctcgtttatcttggaacatggaatgggaacatttttgttatcaacggccatctttgccttaattccagatgttgtaaaattataactaaacagtctatcatcgacacaaatgaaattcttgtttagacgtttgtagtttacgtatgcggctcgttcgcgtctcattttttcagatattgcaggtactataatattaaaaataagaatgaaataacataggattaaaaataaagttatcatgacttctagcgctgatttaactaacttaaaagaattacttagtctgtacaaaagtttgagattttcagattctgcggctatagaaaagtataattctttggtagaatggggaacatctacttactggaaaataggcgtgcaaaaggtagctaatgtcgagacgtcaatatctgattattatgatgaggtaaaaaataaaccgtttaatattgatccgggctattacattttcttaccggtatattttgggagcgtctttatttattcgaagggtaaaaatatggtagaacttggatctggaaactcttttcaaataccagatgatatgcgaagtgcgtgtaacaaagtattagacagcgataacggaatagactttctgagatttgttttgttaaacaatagatggataatggaagatgctatatcaaaatatcagtctccagttaatatatttaaactagctagtgagtacggattaaacatacccaaatatttagaaattgaaatagaggaagacacattatttgacgacgagttatactctattatagaacgctctttcgatgataaatttccaaaaatatccatatcgtatattaagttgggagaacttagacggcaagttgtagactttttcaaattctcattcatgtatattgagtccatcaaggtagatcgtataggagataatatttttattcctagcgttataacaaaatcaggaaaaaagatattagtaaaagatgtagaccatttaatacgatccaaggttagagaacatacatttgtaaaagtaaaaaagaaaaacacattttccattttatacgactatgatggaaacggaacagaaactagaggagaagtaataaaacgaattatagacactataggacgagactattatgttaacggaaagtatttctctaaggttggtagtgcaggcttaaagcaattgactaataaattagatattaatgagtgcgcaactgtcgatgagttagttgatgagattaataaatccggaactgtaaaacgaaaaataaaaaaccaatcagcatttgatttaagcagagaatgtttgggatatccagaagcggattttataacgttagttaataacatgcggttcaaaatagaaaattgtaaggttgtaaatttcaatattgaaaatactaattgtttaaataacccgagtattgaaactatatatggaaactttaaccagttcgtctcaatctttaatgtcgtcaccgatgtcaaaaaaagattattcgagtgaaataatatgcgcctttgatataggtgcaaaaaatcctgccagaactgttttagaagtcaaggataactccgttagggtattggatatatcaaaattagactggagttctgattgggaaaggcgcatagctaaagatttgtcacaatatgaatacactacagttcttctagaacgtcagcctagaaggtcgccgtatgttaaatttatctattttattaaaggctttttatatcatacatcggctgccaaagttatttgcgtctcgcctgtcatgtctggtaattcatatagagatcgaaaaaagagatcggtcgaagcatttcttgattggatggacacattcggattgcgagactccgttccggatagacgcaaattagacgatgtagcggatagtttcaatttggctatgagatacgtattagataaatggaatactaattatacaccttataataggtgtaaatctagaaattacataaaaaaaatgtaataacgttagtaacgccattatggataatctatttacctttctacatgaaatagaagatagatatgccagaactatttttaactttcatctaataagttgcgatgaaataggagatatatatggtcttatgaaagaacgcatttcctcagaggatatgtttgataatatagtgtataataaagatatacatcctgccattaagaaactagtgtattgcgacatccaacttactaaacacattattaatcagaatacgtatccggtatttaacgattcttcacaagtgaaatgttgtcattatttcgacataaactcagataatagcaatattagctctcgtacagtagagatatttgagagggaaaagtcatctcttgtatcatatattaaaactaccaataagaagagaaaggtcaattacggcgaaataaagaaaactgttcatggaggcactaatgcaaattacttttccggtaaaaagtctgacgagtatctgagtactacagttagatccaacattaatcaaccttggatcaaaaccatctctaagaggatgagagttgatatcattaatcactctatagtaacgcgtggaaaaagctctatattacaaactatagaaattatttttactaatagaacatgtgtgaaaatattcaaggattctactatgcacattattctatccaaggacaaggatgaaaaggggtgtatacacatgattgacaaattattctatgtctattataatttatttctgttgttcgaagatatcatccaaaacgagtactttaaagaagtagctaatgttgtaaaccacgtactcacggctacggcattagatgagaaattattcctaattaagaaaatggctgaacacgatgtttatggagttagcaatttcaaaatagggatgtttaacctgacatttattaagtcgttggatcataccgttttcccctctctgttagatgaggatagcaaaataaagttttttaaggggaaaaagctcaatattgtagcattacgatctctggaggattgtataaattacgtgactaaatccgagaatatgatagaaatgatgaaggaaagatcgactattttaaatagcatagatatagaaacggaatcggtagatcgtctaaaagaattgcttctaaaatgaaaaaaaacactaattcagaaatggatcaacgactagggtataagtttttggtgcctgatcctaaagccggagttttttatagaccgttacatttccaatatgtatcgtattctaattttatattgcatcgattgcatgaaatcttgaccgtcaagcggccactcttatcgtttaagaataatacagaacgaattatgatagaaattagcaatgttaaagtgactcctccagattactcacctataatcgcgagtattaaaggtaagagttatgacgcattagccacgttcactgtaaatatctttaaagaggtaatgaccaaagagggtatatccatcactaaaataagtagttatgagggaaaagattctcatttgataaaaattccgctactaataggatacgggaataaaaatccacttgatacagccaagtatcttgttcctaatgtcataggtggagtctttatcaataaacaatctgtcgaaaaagtaggaattaatctagtagaaaagattacaacatggccaaaatttagggttgttaagccaaactcattcactttctcgttttcctccgtatcccctcctaatgtattaccgacaagatatcgccattacaagatatctctggatatatcacaattggaagcgttgaatatatcatcgacaaagacatttataacggtcaatattgttttgctgtctcaatatttatctagagtgagtctagaattcattagacgtagtttatcatacgatatgcctccagaagttgtctatctagtaaacgcgataatagatagtgctaaacgaattactgaatctattactgactttaatattgatacatacattaatgacctggtggaagctgaacacattaaacaaaaatctcagttaacgatcaacgagttcaaatatgaaatgctgcataactttttacctcatatgaactatacacccgatcaactaaagggattttatatgatatctttactaagaaagtttctctactgtatcttccacacttctagatatccagatagagattcgatggtttgtcatcgcatcctaacgtacggcaaatattttgagacgttggcacatgatgaattagagaattacataggcaacatccgaaacgatatcatgaacaatcacaagaacagaggcacttacgcggtaaacattcatgtactaacaactcccggacttaatcacgcgttttctagcttattgagtggaaagttcaaaaagtcagacggtagttatcgaacacatcctcactattcatggatgcagaatatttctattcctaggagtgttggattttatccggatcaagtaaagatttcaaagatgttttctgtcagaaaataccatccaagtcaatatctttacttttgttcatcagacgttccggaaagaggtcctcaggtaggtttagtatctcaattgtctgtcttgagttccattacaaatatactaacgtctgagtatttggatttggaaaagaaaatttgtgagtatatcagatcatattataaagatgatataagttactttgaaacaggatttccaatcactatagaaaatgctctagtcgcatctcttaatccaaatatgatatgtgattttgtaactgactttagacgtagaaaacggatgggattcttcggtaacttggaggtaggtattactttagttagggatcacatgaatgaaattcgcattaatattggagcgggaagattagtcagaccattcttggttgtggataacggagagctcatgatggatgtgtgtccggagttagaaagcagattagacgacatgacattctctgacattcagaaagagtttccgcatgtcatcgaaatggtagatatagaacaatttacttttagtaacgtatgtgaatcggttcaaaaatttagaatgatgtcaaaggatgaaagaaagcaatacgatttatgtgactttcctgccgaatttagagatggatatgtagcatcttcattagtgggaatcaatcacaattctggacccagagctattcttggatgtgctcaagctaaacaagctatctcttgtctgagctcggatatacgaaataaaatagacaatggaattcatttgatgtatccagagaggccaatcgtgattagtaaggctttagaaacttcaaagattgcggctaattgcttcggccaacatgttactatagcattaatgtcgtacaaaggtatcaatcaagaggatggaattatcatcaaaaaacaatttattcagagaggcggtctcgatattgttacagccaagaaacatcaagtagaaattccattggaaaactttaataacaaagaaagagataggtctaacgcctattcaaaattagaaagtaatggattagttagactgaatgctttcttggaatccggagacgctatggcacgaaatatctcatcaagaactcttgaagatgattttgctagagataatcagattagcttcgatgtttccgagaaatataccgatatgtacaaatctcgcgttgaacgagtacaagtagaacttactgacaaagttaaggtacgagtattaaccatgaaagaaagaagacccattctaggagacaaatttaccactagaacgagtcaaaagggaacagtcgcgtatgtcgcggatgaaacggaacttccatacgacgaaaatggtatcacaccagatgtcattattaattctacatccatcttctctagaaaaactatatctatgttgatagaagttattttaacagccgcatattctgctaagccgtacaacaataagggagaaaaccgacctgtctgttttcctagtagtaacgaaacatccatcgatacatatatgcaattcgctaaacaatgttatgagcattcaaatccgaaattgtccgatgaagaattatcggataaaatcttttgtgaaaagattctctatgatcctgaaacggataagccttatgcatccaaagtattttttggaccaatttattacttgcgtctgaggcatttaactcaggacaaggcaaccgttagatgtagaggtaaaaagacgaagctcattagacaggcgaatgagggacgaaaacgtggaggaggtatcaagttcggagaaatggagagagactgtttaatagcgcatggtgcagccaatactattacagaagttttgaaagattcggaagaagattatcaagatgtgtatgtttgtgaaaattgtggagacatagcagcacaaatcaagggtattaatacatgtcttagatgttcaaaacttaatctctctcctctcttaacaaaaattgataccacgcacgtatctaaagtatttcttactcaaatgaacgccagaggcgtaaaagtcaaattagatttcgaacgaaggcctccttcgttttataaaccattagataaagttgatctcaagccgtcttttctggtgtaatattctagtttggtagtagatacatatcaatatcatcaaattcgagatccgaattataaaatgggcgtggattgttaactatagaatcggacgtctgatattcgaaaatctgtggagtttcaggttttggtggaggtgtaactgctacttgggatactgaagtctgatattcagaaagctgtggatgttctggttcggcatccaccgatggtgtcacatcactaatcggttcggtaacgtctgtggatggaggtgctacttctacagaacctgtagcctcagttgtcaacggagatacatttttaatgcgagaaaatgtataatttggtaatggtttcttatgtggatctgaagaagaggtaagatatctactagaaagataccgatcacgttctagttctcttttgtagaacttaactttttctttctccgcatctagttgatattccaacctcttcacgttactacgttcagattccaattcacgttcgcatgggttacctccgcagtttttacgagcgatttcacgttcagccttcatgcgtctctccctctctctatcgagtttatcagagcagtctttctgaaggcgatcgaactccataaatttctccaacgctttgattgtttccatagatttccgaagttcagcttttaggactgtgattctttttctttcgaattcacagctggatgtacaaccgtttccattaccgccatctctaagtttcttttctagatcggcaacatttcatccccatgccttttacattcctcgagtctactgtcgtcgaaatatcgttccagctccttttcgacatcaataactttagcacgttgtctctcaagctctcttttgtagttatctgattccctggcacgtttaagatcttcatgcaattgagtcagctcttaacttcctctcttgcttcttcgtcatagtacgcgcaatcactgtgagatccattgttaccacgtctacactcggcgagctcgcgtttaagagattcaatttcccgtttgtattggtccatgtttccattgctaccaccattagatttacaggctgctagttgtcgttcgagatcagaaatacgggttttcttggaattgatttcgtcgatgtacttggcatcgaaacacttattaagttctttttccaattctacgattttatttctttcgcgagtcaattccctcctgtagtaactatctgttttgtcagattcacgctctctacgtagactttcttgcaagttactaatttgttccctagcacgtccgagtttagttttatatgctgaatagagttctgattcatcctttgagcagatctctagcgatcgtttaagattcctaattctagtctttagcctatttacctcctcagaagatgttccgttaccgttgcgtttacactcgttaagctgtctatcaagatccatgattctatctctaagacgttgcatctctctttccatatcagcattgctttcattattacgtctgcagtcactcaactgtctttcaatatctgagattctatctctaagacgtcgcatctctctctgtttcggcattggtttcattattacgtttacagtcgttcaactgtctttcaagatctgatattctagattggagtctgctaatctctgtagcattttcacggcattcactcagttgtctttcaagatctgaaattttagattggagtctgctaatctctgtaagatttcctcctccgctctcgatgcagtcggtcaacttattctctagttctctaatacgcgaacgcagtgcatcaacttcttgcgtgtcttcctggttgcgtgtacattcatcgagatctctaacgcgtcgtcgttcttcctcaagttctctgcgtactacagaaagcgtgtccctatcttgttgatatttagcaatttctgattctagagtactgattttgcttacgtagttactaatagttgtcttggccttatcaagatcctccttgtatttgtcgcattccttgatatccctacgaagtctggacagttcccattcgacattacgacgtttatcgatttcagctcggagatcgtcatcgcgttgttttagccacatacgactgagttcaagttctcgttgacaagatccatctacttttccattcctaatagtatccagttccttttctagttctgaacgcatttctcgttccctatcaagcgattctctcaattctcggatagtcttcttatcaatttctaataaatctgaaccatcatctgtcccattttgaatatccctgtgttctttgatctcttttgtaagtcggtcgattctttcggttttataaacagaatccctttccaaagtcctaatcttactgagtttatcactaagttctgcattcaattcggtgagttttctcttggcttcttccaactctgttttaaactctccactatttccgcattcttcctcgcatttatctaaccattcaattagtttattaataactagttggtaatcagcgattcctatagccgttcttgtaattgtgggaacataattaggatcttctaatggattgtatggcttgatagcatcatctttatcattattagggggatggacaaccttaattggttggtcctcatctcctccagtagcgtgtggttcttcaataccagtgttagtaataggcttaggcaaatgcttgtcgtacgcgggcacttcctcatccatcaagtatttataatcgggttctacttcagaatattcttttctaagagacgcgacttcgggagttagtagaagaactctgtttctgtatctatcaacgctggaatcaatactcaagttaaggatagcgaatacctcatcgtcatcatccgtatcttctgaaacaccatcatatgacatttcatgaagtctaacgtattgataaatagaatcagatttagtattaaacagatccttaacctttttagtaaacgcatatgtatattttagatctccagatttcataatatgatcacatgccttaaatgtcagtgcttccatgatataatctggaacactaatgggtgacgaaaaagatacagcaccatatgctacgttgataaataaatctgaaccactaagtagataatgattaatgttaagaaagaggaaatattcagtgtataggtatgtcttggcgtcatatcttgtactaaacacgctaaacagtttgttaatgtgatcaatttccaatagattaattagagcagcgggaataccaacaaacatattaccacatccgtattttctatgaatatcacatatcatgttaaaaaatcttgatagaagagcgaatatctcgtctgacttaatgagtcgtagttcagcagcaacataagtcataactgtaaatagaacatactttcctgtagtgttgattctagactccacatcaacaccattattaaaaatagttttatatacatctttaatctgctctccgttaatcgtcgaacgttctagtatacggaaacactttgatttcttatctgtagttaatgacttagtgatatcacgaagaatattacgaattacatttcttgtttttcttgagagacctgattcagaactcaactcatcgttccatagtttttctacctcagtggcgaaatctttggagtgcttggtacatttttcaataaggttcgtgacctccatttattataaaaaatttattcaaaacttaactacaatcgggtaattataagatcgtagatctcccatgtggcggaatactaccatctatcgcatgtggatggacagtaggtaatggccatgggaacagtaatgtttgcatatttatctttcttgctagtattactgcatattgtcccaatgtttcgatgtgatgttctaacctatcaactgccgctgtatcacaacaatagtgtccgatgaaattaagattatgatccaatgtgtttaatatatgattatcaagtcttatacgatccgcgtcttttttgacaggatcaggttcttctacaggaagaagtttcggcctcttatgatattcatgtctgggaaacggtggtctagggtgaggctccggtatcggagtgggttttggattataatcatcatcgtctatgacatcatcttcgacttcgatatttattttgctatcttgatgatgtcctgtatcagttgcattttcagcactcgactgaatattagcgcattcattgtctattattaccatatttctaaacccaaaatgtatgtgttgaacatcagtactatcgttgatgagtcttatagcatgaattcgcttatcgttatcgggtttatcttctgtcaccttagcaattccttttttattaaactctacataatcatatccatttctattgtttgttctaatataaacgagtatagcatcattgctaaatttttcaatagtatcaaaaacagaatatcctaaaccatataatatatattcaggaacactcaaactaaatgtccaggattctcctaaatacgtaaactttaatagtgcgaaatcattcaaaaatctaccacttatagatagatagtacataaatgcgtatagtagtctacctatctctttattatgaaaaccggcattacgatcatatatgtcgtgatatacctgtgatccgtttacgttaaaccataaatacatgggtgatcctataaacatgaatttatttctaattctcagagctatagttaattgaccgtgtaatatttgcttacatgcatacttgatacgcttattaataagatttttatcattgctcgttatttcagaatcgtatatataaggagtaccatcgtgattcttaccagatattatacaaaatactatatataaaatatattgacccacgttagtaatcatataaatgtttaacgttttaaattttgtattcaatgatccattatcatacgctatcatggtcttgtaatattcattctttaaaatataatattgtgttagccattgcattggagctcctaatggagattttctattctcatccattttaggataggctttcataaagtccctaataacttcgtgaataatgtttctatgttttctactgatgcatgtatttgcttcgatttttttatcccatgtttcatctatcatagatttaaacgcagtaatgctcgcaacattaacatcttgaaccgttggtacaattccgttccataaatttataatgttcgccatttatataactcattttttgaatatacttttaattaacaaaagagttaagttactcatatggacgccgtccagtctgaacatcaatctttttagccagagatatcatagccgctcttagagtttcagcgtgattttccaacctaaatagaacttcatcgttgcgtttacaacacttttctatttgttcaaactttgttgttacattagtaatctttttttccaaattagttagccgttgtttgagagtttcctcattgtcgtcttcatcggctttaacaattgcttcgcgtttagcctctggctttttagcagcctttgtagaaaaaaattcagttgctggaattgcaagatcgtcatctccggggaaaagagttccgtccatttaaagtacagattttagaaactgacactctgcgttatttatatttggtacaacacatggattataaatattgatgttaataacatcagaaaatgtaaagtctatacattgttgcatcgtgttaaattttctaatggatctagtattattgggtccaacttctgcctgaaatccaaatatggaagcggatacaaaaccgtttcctggataaaccacacatctccacttttgctttacatcagaaattgtgtcgttgacatcttgaactctcctatctaatgccggtgttccacctatagattttgaatattcgaatgctgcatgagtagcattaaattccttaatattgccataattttcatatattgagtaaccctggataaaaagtaaacacaccgcagccgtcgctaccacaataaaaaaaattgatagagagttcatttataatctattagaagctgacaaaatttttttacacgcatcagacaatgctttaataaatagttcaacatctacttttgtcatatcgaaccgatggtatgattctaacctagaattacatccgaaaaagttgactatgttcatagtcattaagtcattaacaaacaacattccagactctggattataagacgatactgtttcgtcacaattacctaccttaatcatgtgattatgaatattggctattagagcaccttctaagaaatctataatatctttgaaacacgatttaaaatcaaaccacgaatatacttctacgaagaaagttagtttacccataggagaaataactataaatggagatctaaatacaaaatccggatctatgatagttttaacattattatattctctattaaatacctccacatctaaaaatgttaattttgaaactatgtcttcgtttattaccgtacctgaactaaacgctataagctctattgtttgagaactctttaaacgatattcttgaaatacatgtaacaaagtttcctttaactcggtcggtttatctaccatagttacagaatttgtatccttatctataatataataatcaaaatcgtataaagttatataattatcgcgttcagattgtgatcttttcaaatagactaaaaaccccatttctctagtaagtatcttatgtatatgtttgtaaaatatcttcatggtgggaatatgctctaccgcagttagccattcctcattgacagcggtagatgtattagacaaaactattccaatgtttaacaagggccattttacgagattattaaatccttgtttgataaatgtagccaatgagggttcgagttcaacgacgattgaattctcttcccgcggatgctgcatgatgaacgacgggatgttgttcgattgatttggaattctttttcgactttttgtttatattaaatattttaaaatttatagcggatagcaattcatgtaccacggataatgtagacgcgtattgcgcatcgatatctttattattagataaatttatcaataaatgtgagaagtttgcctcgttaaggtcttccatttaaatattatataaacatttgtgtttgtatcttattcgtcttttatggaatagttttttactagtaaagctgcaattacacactttgtccgtaaaacataaatataaacaccagcttttatcaatcgttccaaaaagtcgacggcggacatttttaacatggcatctattttaaatacacttaggtttttggaaaaaacatcattttataattgtaacgattcaataactaaagaaaagattaagattaaacataagggaatgtcatttgtattttataagccaaagcattctaccgttgttaaatacttgtctggaggaggtatatatcatgatgatttggttgtattggggaaggtaacaattaataatctaaagatgatgctattttacatggatttatcatatcatggagtgacaagtagtggagcaatttacaaattgggatcgtctatcgatagactttctctaaataggactattgttacaaaagttaataattatgatgatacattttttgacgacgatgattgatcgctattgcacaattttgtttttgtactttctaatatagtgtttaggttctttttcatatgagaatattgatttactaaaatatctatgtttaacttttgttctatgacgtccttatcggcggtatcggtacatatacgtaattcaccttcacaaaatacggagtcttcgataataatagccaatcgattattggatctagctgtctgtatcatattcaacatgtttaatatatcctttcgtttcccctttacaggcatcgatcgtagcatattttccgcgtctgatatggaaatgttaaaactacaaaaatgcgtaatgttagcccgtcctaatattggtacgtgtctataagtttggcatagtagaataatagacgtgtttaaatgccttccaaagtttaagaattctattagagtattgcattttgatagtttatcgcctacatcatcaaaaataagtaaaaagtgtgctgattttttatgattttgtgcgacagcaatacatttttctatgttacttttagttcgtatcagattatattctagagattcctgactactaacgaaattaatatgatttggccaaatgtatccatcataatctgggttataaacgggtgtaaacaagaatatatgtttatattttttaactagtgtagaaaacagagatagtaaatagatagtttttccagatccagatcctcctgttaaaaccattctaaacggcatttttaataaattttctcttgaaaattgtttttcttggaaacaattcataattatatttacagttactaaattaatttgataataaatcaaaatatggaaaactaaggttgttagtagggaggagaacaaagaaggcacatcgtgatataaataacatttattatcatgatgacaccagaaaacgacgaagagcagacatctgtgttctccgctactgtttacggagacaaaattcagggaaagaataaacgcaaacgcgtgattggtctatgtattagaatatctatggttatttcactactatctatgattaccatgtccgcgtttctcatagtgcgcctaaatcaatgcatgtctgctaacgaggctgctattactgacgccgctgttgccgttgctgctgcatcatctactcatagaaaggttgcgtctagcactacacaatatgatcacaaagaaagctgtaatggtttatattaccagggttcttgttatatattacattcagactaccagttattctcggatgctaaagcaaattgcactgcggaatcatcaacactacccaataaatccgatgtcttgactacctggctcattgattatgttgaggatacatggggatctgatggtaatccaattacaaaaactacatccgattatcaagattctgatgtatcacaagaagttagaaagtatttttgtgttaaaacaatgaactaatatttatttttgtacattaataaatgaaatcgcttaatagacaaactgtaagtaggtttaagaagttgtcggtgccggccgctataatgatgatactctcaaccattattagtggcataggaacatttctgcattacaaagaagaactgatgcctagtgcttgcgccaatggatggatacaatacgataaacattgttatttagatactaacattaaaatgtctacagataatgcggtttatcagtgtcgtaaattacgagctagattgcctagacctgatactagacatctgagagtattgtttagtattttttataaagattattgggtaagtttaaaaaagaccaatgataaatggttagatattaataatgataaagatatagatattagtaaattaacaaattttaaacaactaaacagtacgacggatgctgaagcgtgttatatatacaagtctggaaaactggttaaaacagtatgtaaaagtactcaatctgtactatgtgttaaaaaattctacaagtgacaacaaaaaatgaattaataataagtcgttaacgtacgccgccatggacgccgcgtttgttattactccaatgggtgtgttgactataacagatacattgtatgatgatctcgatatctcaatcatggactttataggaccatacattataggtaacataaaaactgtccaaatagatgtacgggatataaaatattccgacatgcaaaaatgctactttagctataagggtaaaatagttcctcaggattctaatgatttggctagattcaacatttatagcatttgtgccgcatacagatcaaaaaataccatcatcatagcatgcgactatgatatcatgttagatatagaagataaacatcagccattttatctattcccatctattgatgtttttaacgctacaatcatagaagcgtataacctgtatacagctggagattatcatctaatcatcaatccttcagataatctgaaaatgaaattgtcgtttaattcttcattctgcatatcagacggcaatggatggatcataattgatgggaaatgcaatagtaattttttatcataaaagttgtaaagtaaataataaaacaataaatattgaactagtagtacgtatattgagcaatcagaaatgatgctggtacctcttatcacggtgaccgtagttgcgggaacaatattagtatgttatatattatatatttgtaggaaaaagatacgtactgtctataatgacaataaaattatcatgacaaaattaaaaaagataaagagttctaattccagcaaatctagtaaatcaactgatagcgaatcagactgggaggatcactgtagtgctatggaacaaaacaatgacgtagataatatttctaggaatgagatattggacgatgatagcttcgctggtagtttaatatgggataacgaatccaatgttatggcgcctagcacagaacacatttacgatagtgttgctggaagcacgctgctaataaataatgatcgtaatgaacagactatttatcagaacactacagtagtaattaatgaaacggagactgttgaagtacttaatgaagataccaaacagaatcctaactattcatccaatcctttcgtaaattataataaaaccagtatttgtagcaagtcaaatccgtttattacagaacttaacaataaatttagtgagaataatccgtttagacgagcacatagcgatgattatcttaataagcaagaacaagatcatgaacacgatgatatagaatcatcggtcgtatcattggtgtgattagtttcctttttataaaattgaagtaatatttagtattattgctgccgtcacgttgtacaaatggagatattccctgtattcggcatttctaaaattagcaattttattgctaataatgactgtagatattatatagatacagaacatcaaaaaattatatctgatgagatcaatagacagatggatgaaacggtacttcttaccaacatcttaagcgtagaagttgtaaatgacaatgagatgtaccatcttattcctcatagattatcgacgattatactctgtattagttctgtcggaggatgtgttatctctatagataatgacatcaatggcaaaaatattctaacctttcccattgatcatgctgtaatcatatccccactgagtaaatgtgtcgtagttagcaagggtcctacaaccatattggttgttaaagcggatatacctagcaaacgattggtaacatcgtttacaaacgacatactatatgtaaacaatctgtcactgattaattatttgccgttgtctgtattcattattagacgagtcaccgactatttggatagacacatatgcgatcagatatttgctaataataagtggtattcccttataaccatcgacgataagcaatatcctattccatcaaactgtataggtatgtcctctgccaagtacataaattctagcatcgagcaagatactttaatccatgtttgtaacctcgagcatccgttcgactcagtatacaaaaaaatgcagtcgtacaattctctacctatcaaggaacaaatattgtacggtagaattgataatataaatatgagcattagtatttctgtggattaatagatttctagtatggggatcattaatcatctctaatctctaaatacctcataaaacgaaaaaaaagctattatcaaatactgtacggaatggattcattctcttctctttttatgaaactctgttgtatatctactgataaaactggaagcaaaaaatctgatagaaagaataagaataagatcaaggattatatggaacacgattattataaaataacaatagttcctggttcctcttccacgtctactagctcgtggtattatacacatgcctagtaatagtctctttgcgttgacggaaagcagactagaaataacaggctaaaatgttcagacaccataatagttcccaacccagataataacagagttccatcaacacattcctttaaactcaatcccaaacccaaaaccgttaaaatgtatccggccaattgatagtagataatgaggtgtacagcgcatgataatttacacagtaaccaaaatgaaaatactttagtaattataagaaatatagacggtaatgtcatcatcaacaatccgataatatgcctgagagtaaacattgacggataaaacaaaaatgctccgcataactctatcatggcaataacacaaccaaatacttgtaagattcctaaattagtagaaaatacaacgaatatcgatgtataagtgatctcgagaaataataagaataaagtaatgcccgtaaagataaacatcaacattgtttggtaatcattaaaccaattagtatgaagttgaactaatttcacagtagattttattccagtgttatcctcgcatgtataagtacctggtaagatatctttatattccataatcaatgagacatcactatctgataacgaatgaagtctagcactagtatgccatttacttaatattgtcgtcttggaagttttattataagttaaaatatcatggttatccaatttccatctaatatactttgtcggattatctatagtacacggaataatgatggtatcattacatgctgtatactctatggtctttgtagttgttataacaaccaacgtatagaggtatatcaacgatattctaactcttgacattttttatttatttaaaatgatacctttgttatttattttattctattttgctaacggtattgaatggcataagtttgaaacgagtgaagaaataatttctacttacttattagacgacgtattatacacgggtgttaatggggcggtatacacattttcaaataataaactaaacaaaactggtttaactaataataattatataacaacatctataaaagtagaggatgcggataaggatacattagtatgcggaaccaataacggaaatcccaaatgttggaaaatagacggttcagacgacccaaaacatagaggtagaggatacgctccttatcaaaatagcaaagtaacgataatcagtcacaacggatgtgtactatctgacataaacatatcaaaagaaggaattaaacgatggagaagatttgacggaccatgtggttatgatttattcacggcggataacgtaattccaaaagatggtttacgaggagcattcgtcgataaagacggtacttatgacaaagtttacattcttttcactgatactatcggctcaaagagaattgtcaaaattccgtatatagcacaaatgtgcctaaacgacgaaggtggtccatcatcattgtctagtcatagatggtcgacgtttctcaaagtcgaattagaatgtgatatcgacggaagaagttatagacaaattattcattctagaactataaaaacagataatgatacgatactatatgtattcttcgatagtccttattccaagtccgcattatgtacctattctatgaataccattaaacaatctttttctacgtcaaaattggaaggatatacaaagcaattgccgtctccagctcctggtatatgtttaccagctggaaaagttgttccacataccacgtttgaagtcatagaacaatataatgtactagatgatattataaagcctttatctaaccaacctatcttcgaaggaccgtctggtgttaaatggttcgatataaaggagaaggaaaatgaacatcgggaatatagaatatacttcataaaagaaaattctatatattcgttcgatacaaaatctaaacaaactcgtagctcgcaagtcgatgcgcgactattttcagtaatggtaactgcgaaaccgttatttatagcagatatagggataggagtaggaatgccacaaatgaaaaaaatacttaaaatgtaatcttaatcgagtacaccacacgacaatgaacaaacataagacagattatgctggttatgcttgctgcgtaatatgcggtctaattgtcggaattatttttacagcgacactattaaaagttgtagaacgtaaattagttcatacaccattaatagataaaacgataaaagatgcatatattagagaagattgtcctactgactggataagctataataataaatgtatccatttatctactgatcgaaaaacctgggaggaaggacgtaatgcatgcaaagctctaaattcaaattcggatctaattaagatagagactccaaacgagttaagttttttaagaagccttagacgaggctattgggtaggagaatccgaaatattaaaccagacaaccccatataattttatagctaagaatgccacgaagaatggaactaaaaaacggaaatatatttgtagcacaacgaatactcccaaactgcattcgtgttacactatataacaattacactacatttttatcataccactacttcggttagatgttttagaaaaaaataaatatcgccgtaccgttcttgtttttataaaaataacaattaacaattatcaaattttttctttaatattttacgtggttgaccattcttggtggtaaaataatctcttagtgttggaatggaatgctgtttaatgtttccacactcatcgtatattttgacgtatgtagtcacatcgtttacgcaatagtcagactgtagttctatcatgcttcctacatcagaaggaggaacagttttaaagtctcttggttttaatctattaccgttagttttcatgaaatcctttgttttatccacttcacattttaaataaatgtccactatacattcttttgttaattttactagatcgtcatgggtcatagaatttataggttccgtagtccatggatccaaactagcaaacttcgcgtatacggtatcgcgattagtgtatacaccaactgtatgaaaattaagaaaacagtttaataaatcaacagaaatatttaatcctccgtttgatacagatgcgccatatttatggatttcggattcacacgttgtttgtctgaggtgttcgtctagtgttgcttctacgtaaacttcgattcccatatattctttattgtcagaatcgcataccgatttatcatcatacactgtttgaaaactaaatggtatacacatcaaaataataaataataacgagtacattctgcaatattgttatcgtaattggaaaaatagtgttcgagtgagttggattatgtgagtattggattgtatattttattttatattttgtaataagaataaaatgctaatgtcaagtttattccaatagatgtcttattaaaaacatatataataaataacaatggctgaatggcataaaattatcgaggatatctcaaaaaataataagttcgaggatgccgccatcgttgattacaagactacaaagaatgttctagctgctattcctaacagaacatttgccaagattaatccgggtgaaattattcctctcatcactaatcgtaatattctaaaacctcttattggtcagaaatattgtattgtatatactaactctctaatggatgagaacacgtatgctatggagttgcttactgggtacgcccctgtatctccgatcgttatagcgagaactcataccgcacttatatttttgatgggtaagccaacaacatccagacgtgacgtgtatagaacgtgtagagatcacgctacccgtgtacgtgcaactggtaattaaaataaaaagtaatattcatatgtagtgtcaattttaaatgatgatgatgaaatggataatatccatattgacgatgtcaataatgccggtattggcatacagttcatcgatttttagatttcattcagaggatgtggaattatgttatgggcatttgtattttgataggatctataatgtagtaaatataaaatataatccgcatattccatatagatataattttattaatcgcacgttaaccgtagatgaactagacgataatgtcttttttacacatggttattttttaaaacacaaatatggttcacttaatcctagtttgattgtctcattatcaggaaacttaaaatataatgatatacaatgctcagtaaatgtatcgtgtctcattaaaaatttggcaacgagtacatctactatattaacatctaaacataagacttattctctacatcggtccacgtgtattactataataggatacgattctattatatggtataaagatataaatgacaagtataatgacatctatgattttactgcaatatgtatgctaatagcgtctacattgatagtgaccatatacgtgtttaaaaaaataaaaatgaactcttaattatgctatgctattagaaatggataaaatcaaaattacggttgattcaaaaattggtaatgttgttaccatatcgtataacttggaaaagataactattgatgtcacacctaaaaagaaaaaagaaaaggatgtattattagcgcaatcagttgctgtcgaagaggcaaaagatgtcaaggtagaagaaaaaaatattatcgatattgaagatgacgatgatatggatgtagaaagcgcgtaatacgatctataaaaataagtatataaatactttttatttactgtactcttactgtgtagtggtgataccctactcgattatttttttaaaaaaaaaatacttattctgattcttctagccatttccgtgttcgtttgaatgccacatcgacgtcaaagataggggagtagttgaaatctagttctgcattgttggtacgcacctcaaatgtagtgttggatatcttcaacgtatagttgttgagtagtgatggttttctaaatagaattctcttcatatcattcttgcacgcgtacatttttagcatccatcttggaatcctagatccttgttctattcccaatggtttcatcaatagaagattaaacatatcgtacgaacacgatggagagtaatcgtagcaaaagtaagcatttcctttaatcttagatcccggatactggatatattttgcagccaacacgtgcatccatgcagcatttcctacatatacccggctatgcaccgcgtcatcatcgactgtacgatacataatgttaccgtgttgcttacattgctcgtaaaagactttcatcaatttgtctccttctccgtaaattccagtgggtcttaggcaacaagtatacaattttgctccattcatgattacggaattattggctttcataaccagttgctcggccatacgtttactttttgcgtatacatgtcctggtgatatatcataaagggtatgctcatggccgatgaatggatcaccgtgtttattgggtcctattgcttccatgctactagtatagatcaaatacttgattcctaggtccacacaagctgccaaaatagtctgtgttccataatagtttactttcatgatttcattatcggtgtattttccaaatacatccactagagcagccgtatgaataatcagatttaccccatctagcgcttctctcaccttatcaaagtcgtttatatcacattgtatatagtttataaccttaactttcgaggttattggttgtggatcttctacaatatctatgactctgatttcttgaacatcatctgcactaattaacagttttactatatacctgcctagaaatccggcaccaccagtaaccgcgtacacggccattgctgccactcataatatcagactacttattctattttactaaataatggctgtttgtataatagaccacgataatatcagaggagttatttactttgaaccagtccatggaaaagataaagttttaggatcagttattggattaaaatccggaacgtatagtttgataattcatcgttacggagatattagtcaaggatgtgattccataggcagtccagaaatatttatcggtaacatctttgtaaacagatatggtgtagcatatgtttatttagatacagatgtaaatatatttacaattattggaaaggcgttatctatttcaaaaaatgatcagagattagcgtgtggagttattggtatttcttacataaatgaaaagataatacattttcttacaattaacgagaatggcgtttgatatatcagttaatgcgtctaaaacaataaatgcattagtttacttttctactcagcaaaataaattagtcatacgtaatgaagttaatgatacacactacactgtcgaatttgatagggacaaagtagttgacacgtttatttcatataatagacataatgacaccatagagataagaggggtgcttccagaggaaactaatattggttgcgcggttagtatgacttacttgtataataagtatagttttaaactgattttagcagaatatataagacacagaaatactatatccggcaatatttattcggcattgatgacactagatgatttggctattaaacagtatggagacattgatctattatttaatgagaaacttaaagtagactccgattcgggactatttgactttgtcaactttgtaaaggatatgatatgttgtgattctagaatagtagtagctctatctagtctagtatctaaacattgggaattgacaaataaaaaatataggtgtatggcattagccgaacatatatctgatagtattccaatatctgagctatctagactacgatacaatctatgtaagtatctacgcggacacactgagagcatagaggataaatttgattattttgaagacgatgattcgtctacatgttctgccgtaaccgacagggaaacggatgtataattttttttatagcgtgaaggatatgataaaaaatataattgttgtatttatcccattccaatcaccttatatgattctgtaacacaataaaggagtcttatagatgtatagaggtcagatactggtttgataaactgtttattccacataagtatgtttgactttatggttagacccgcatactttaacaaatcactgaaaattggagttaggtattgacctctcagaatcagttgccgttctggaacattaaatgtattttttatgatatactccaacgcatttatgtgggcatacaacaagtcattactaatggaatattccaagagttttagttgtctagtatttaacaagagaagagatttcaacagactgtttatgaactcgaatgccgcctcattgtcgcttatattgatgatgtcgaattctcccaatatcatcaccgatgagtagctcatcttgttatcgggatccaagttttctaaagatgtcattaaaccctcgatcatgaatggatttatcatcatcgtttttatgttggacatgagcttagtccgtttgtccacatctatagaagatgatttctgaattatttcatatatctctctctttaactccaggaacttgtcaggatggtctactttaatatgttctcgtctaagagatgaaaatctttggatggttgcacgcgacttttctctaaaggatgacgttgcccaagatcctctcttaaatgaatccatcttatccttggacaagatggacagtctattttccttagatggtttaatatttttgttacccatgatctataaaggtagacctaatcgtctcggatgaccatatatttattttcagttttattatacgcataaattgtaaaaaatatgttaggtttacgaaaatgtctcgtggggcattaatcgtttttgaaggattggacaaatctggaaaaacaacacaatgtatgaacatcatggaatcaataccttcaaacacaataaaataccttaactttcctcagagatccactgtcactggaaagatgatagatgactatctaactcgtaaaaaaacctataatgatcatatagttaatctattattttgtgcaaatagatgggagtttgcatcttttatacaagaacaactagaacagggaattactttaatagttgatagatacgcattttctggagtagcgtatgccgccgctaaaggcgcgtcaatgactctcagtaagagttatgaatctggattgcctaaacccgacttagttatattcttggaatctggtagcaaagaaattaatagaaacgtcggtgaggaaatttatgaagatgttacattccaacaaaaggtattacaagaatataaaaaaatgattgaagaaggagatattcattggcaaattatttcttctgaattcgaggaagatgtaaagaaggagttgattaagaatatagttatagaggctatacacacggttactggaccagtggggcaactgtggatgtaatagtgaaattacattttttataaatagatgttagtacagtgttataaatggatgaagcatattactctggcaacttggaatcagtactcggatacgtgtccgatatgcataccgaactcgcatcaatatctcaattagttattgccaagatagaaactatagataatgatatattaaacaaggacattgtaaattttatcatgtgtagatcaaacttggataatccatttatctctttcctagatactgtatatactattatagatcaagagaactatcagactgagttgattaattcattagacgacaatgaaattatcgattgtatagttaataagtttatgagcttttataaggataacctagaaaatatagtagatgctatcattactctaaaatatataatgaataatccagattttaaaactacgtatgccgaagtactcggttccagaatagccgatatagatattaaacaagtgatacgtaagaatatactacaattgtctaataatatccgcgaacgatatttgtgaaaatattaaaaaaaaatactttttttattaaatgacgtcttttcgtgaatttagaaaattatgctgtgctatatatcacgcatcaggatataaagaaaaatctaaattaattagagactttataacagatagggatgataaatatttgatcattaagctattgcttcccggattagacgatagaatttataacatgaacgataaacaaattataaaattatatagtataatatttaaacaatctcaggaagatatgctacaagatttaggatacggatatataggagacactattaggactttcttcaaagagaacacagaaatccgtccacgagataaaagcattttaactttagaagaagtggatagttttttaactacgttatcatccgtaactaaagaatcgcatcaaataaaattattgactgatgtagcatctgtttgtacatgtaatgatttaaaatgtgtagtcatgcttattgataaagatctaaaaattaaagcgggtcctcggtacgtacttaacgctattagtcctaatgcctatgatgtgtttagaaaatctaataacttgaaagagataatagaaaattcatctaaacaaaatctagactctatatctatttctgttatgactccaattaatcccatgttagcggaatcgtgtgattctgtcaataaggcgtttaaaaaatttccatcaggaatgtttgcggaagtcaaatacgatggtgaaagagtacaagttcataaaaataataacgagtttgccttctttagtagaaacatgaaaccagtactctctcataaagtggattatctcaaagaatacataccgaaagcatttaaaaaagctacgtctatcgtattggattctgaaattgttcttgtagacgaacataatgtaccgctcccgtttggaagtttaggtatacacaaaaagaaagaatataaaaactctaacatgtgtttgttcgtgtttgactgtttgtactttgatggattcgatatgacggacattccattgtacgaacgaagatcttttctcaaagatgttatggttgaaatacccaatagaatagtattctcagagttgacgaatattagtaacgagtctcagttaactgacgtattggatgatgcactaacgagaaaattagaaggattggtcttaaaagatattaatggagtatacgaaccgggaaagagaagatggttaaaaataaagcgagactatttgaacgagggttccatggcagattctgccgatttagtagtactaggtgcctactatggtaaaggagcaaagggtggtatcatggcagtctttctaatgggttgttacgacgatgaatccggtaaatggaagacggttaccaagtgttcaggacacgatgataatacgttaagggagttgcaagaccaattaaagatgattaaaattaacaaggatcccaaaaaaattccagagtggttagtagttaataaaatctatattcccgattttgtagtagaggatccgaaacaatctcagatatgggaaatttcaggagcagagtttacatcttccaagtcccataccgcaaatggaatatccattagatttcctagatttactaggataagagaggataaaacgtggaaagaatctactcatctaaacgatttagtaaacttgactaaatcttaatagttacatacaaactgaaaattaaaataacactatttagttggtggtcgccatggatggtgttattgtatactgtctaaacgcgctagtaaaacatggcgaggaaataaatcatataaaaaatgatttcatgattaaaccatgttgtgaaagagtttgtgaaaaagtcaagaacgttcacattggcggacaatctaaaaacaatacagtgattgcagatttgccatatatggataatgcggtatccgatgtatgcaattcactgtataaaaagaatgtatcaagaatatccagatttgctaatttgataaagatagatgacgatgacaagactcctactggtgtatataattattttaaacctaaagatgccattcctgttatcatatctataggaaaggataaagatgtctgtgaactattaatctcatcagacatatcgtgtgcatgcgtggagttaaattcatatcacgtagccattcttcccatggatgtttccttttttaccaaaggaaatgcatcattgattattctcctgtttgatttctctatcgatgcggcacctctcttaagaagtgtaaccgataataatgttattatatctagacaccagcgtctacatgacgagcttccgagttccaattggttcaagttttacataagtataaagtccgactattgttctatattatatatggttgttgatggatctgtgatgcatgcgatagctgataatagaactcacgcaattattagcaaaaatatattagacaatactacgattaacgatgagtgtagatgctgttattttgaaccacagattaggattcttgatagagatgagatgctcaatggatcatcgtgtgatatgaacagacattgtattatgatgaatttacctgatgtaggcgaatttggatctagtatgttggggaaatatgaacctgacatgattaagattgctctttcggtggctggtaatttaataagaaatcgagactacattcccgggagacgaggatatagctactacgtttacggtatagcctctagataatttttttaagcacgaaataaaaaacataattttaaaccaatctatttcatactattttgtgtgatcaccatggacataaagatagatattagtatttctggtgataaatttacggtgactactaggagggaaaatgaagaaagaaaaaaatatctacctctccaaaaagaaaaaactactgatgttatcaaacctgattatcttgagtacgatgacttgttagatagagatgagatgtttactattctagaggaatattttatgtacagaggtctattaggcctcagaataaaatatggacgactctttaacgaaattaaaaaattcgacaatgatgcggaagaacaattcggtactatagaagaactcaagcagaaacttagattaaattctgaagagggagcagataactttatagattatataaaggtacaaaaacaggatatcgtcaaacttactgtatacgattgcatatctatgataggattgtgtgcatgcgtggtagatgtttggagaaatgagaaactgttttctagatggaaatattgtttacgagcgattaaactgtttattgatgatcacatgcttgataagataaaatctatactgcagaatagactagtatatgtggaaatgtcatagaaagttaaaagttaatgagagcaaaaatatataaggttgtattccatatttgttatttttttctgtaatagttagaaaaatacattcgatggtctatctatcagattattatgtgttataaggtactttttctcataataaactagagtatgagtaagatagtgtttttcaaaacatataaatctaaaattgatggatgagatatacagctattaatttcgaaaatatattttaatctgataactttaaacatggatttttaatggtggtttaacgttttaaaaaaagattttgttattgtagtatatgataatattaaaagatggatataaagaatttgctgactgcatgtactattttttacattactacattggctacggcagatatacctacttcgtcactgccacacgctccggtaaacggggcatgtgacgagggagaatatcttgataagaggcataatcaatgttgtaatcagtgtccacctggagaatttgccaaggttagatgtaatggtaacgataacacaaaatgtgaacgctgcccacctcatacatataccgcaatccccaattactctaatggatgtcatcaatgtagaaaatgcccaacaggatcatttgataaggtaaagtgtaccggaacacagaacagtaaatgttcgtgtcttcctggttggtattgcgctactgattcttcacagactgaagattgtcgagattgtataccaaaaaggagatgtccatgcggatactttggtggaatagatgaacaaggaaatcctatttgtaaatcgtgttgtgttggtgaatattgcgactacctacgtaattatagacttgatccatttcctccatgcaaactatctaaatgtaattaattatgattttgatgataatgttaccatacattatatcgctacttggttagtgtattattcagtatgaagacctattaataattacttatcttttgacgatcttgttataattataatataaaaatacttatggcatagtaactcataattgctgacgcgataaattcgtaataatctgttttgttcaaatttttataaggaatctacaggcataaaaataaaaatataatttataatatactcttacagcgcgccatcatgaataacagcagtgaattgattgctgttattaatggatttagaaatagtggacgattttgtgatattaatatagttattaatgatgaaaggataaacgctcacagactcatcctatctggagcctccgaatatttttccattctgttttccaataattttatcgattctaatgaatacgaagttaatctaagtcatttagattatcaaagtgttaacgatttgatcgattacatttatgggatacctttgagcctaactaacgataacgtgaaatatattctttcaaccgctgattttttacaaattggatctgctattacggagtgtgaaaattacatacttaaaaatctttgttctagaaactgtatcgatttctacatatacgctgataaatataataacaagaaaatagaatcagcgtcgtttaacacaatattacaaaatattttgagactcatcaacgatgaaaactttaaatacttaacagaggaatcaatgataaaaattttaagcgatgatatgttaaatataaaaaatgaggatttcgccccactaattctcattaaatggttagagagtactcaacaaccatgcaccgtcgagttacttaaatgcctcagaatatcattgctttccccacaagttataaaatcactttatagtcatcgactggttagttcaatctacgaatgtataacattcttaaacaatatagcattcttggatgaatcatttcctagataccatagcatcgagttgatatctatcggtataagtaattcgcatgataagatttccataaactgctacaatcataaaaaaaatacatgggaaatgatatcttcacgtagatataggtgtagtttcgcagtggccgtcctggataatattatctatatgatgggtggatatgatcagtccccgtatagaagttcaaaggttatagcgtacaatacatgtacaaattcttggatatatgatataccagagctaaaatatcctcgttctaattgtgggggactggctgatgacgaatacatttattgtataggcggcatacgcgatcaggattcatcgttgacatctagtattgatagatggaagccatcaaaaccatattggcagaagtatgctaaaatgcgcgaaccaaaatgtgatatgggggttgcgatgttaaacggattaatatatgttataggtggaatcgttaaaggtgacacgtgtaccgacgcactagagagtttatcagaagatggatggatgaagcatcaacgtcttccaataaaaatgtccaatatgtcgacgattgttcatgatggcaagatttatatatctggaggttacaacaatagtagtgtagttaatgtaatatcgaatctagtccttagctataattcgatatatgatgaatggaccaaattatcatcattaaacattcctagaattaatcccgctctatggtcagcgcataataaattatatgtaggaggaggaatatctgatgatgttcgaactaatacatctgagacatacgacaaagaaaaagattgttggacattggataatggtcacgtgttaccacgcaattatataatgtataaatgcgaaccgattaaacataaatatccattggaaaaaacacagtacacgaatgattttctaaagtatttggaaagttttataggtagttgatagaacaaaatacataattttgtaaaaataaatcactttttatactaatatgacacgattaccaatacttttgttactaatatcattagtatacgctacaccttttcctcagacatctaaaaaaataggtgatgatgcaactctatcatgtaatcgaaataatacaaatgactacgttgttatgagtgcttggtataaggagcccaattccattattcttttagctgctaaaagcgacgtcttgtattttgataattataccaaggataaaatatcttacgactctccatacgatgatctagttacaactatcacaattaaatcattgactgctagagatgccggtacttatgtatgtgcattctttatgacatcaactacaaatgacactgataaagtagattatgaagaatactccacagagttgattgtaaatacagatagtgaatcgactatagacataatactatctggatctacacattcaccggaaactagttctgagaaacctgattatatagataattctaattgctcgtcggtattcgaaatctaagctcttttttttttttttttttttggcatataaataagtcgaccaccatggtgggtgaggatagcgtgctgatcaccgagaacatgcacatgaaactgtacatggagggcaccgtgaacgaccaccacttcaagtgcacatccgagggcgaaggcaagccctacgagggcacccagaccatgaagatcaaggtggtcgagggcggccctctccccttcgccttcgacatcctggctaccagcttcatgtacggcagcaaaacctttatcaaccacacccagggcatccccgacttctttaagcagtccttccctgagggcttcacatgggagaggatcaccacatacgaagacgggggcgtgctgaccgctacccaggacaccagcctccagaacggctgcctcatctacaacgtcaagatcaacggggtgaacttcccatccaacggccctgtgatgcagaagaaaacactcggctgggaggccagcaccgagatgctgtaccccgctgacagcggcctgagaggccatagccagatggccctgaagctcgtgggcgggggctacctgcactgctccctcaagaccacatacagatccaagaaacccgctaagaacctcaagatgcccggcttctacttcgtggacaggagactggaaagaatcaaggaggccgacaaagagacctacgtcgagcagcacgagatggctgtggccaggtactgcgacctgcctagcaaactggggcacagctgattaattaatttttatcgatctaattcaacaatgtctggagagcttcgcaggatcccgactccggaaccaattactgataaagaagatcatacagttacagacactgtctcatacactacagtaagtacatcatctggaattgtcactactaaatcaaccaccgatgatgcggatctttatgatacgtacaatgataatgatacagtaccaccaactactgtaggcggtagtacaacctctattagcaattataaaaccaaggactttgtagaaatatttggtattaccgcattaattatattgtcggccgtggcaattttctgtattacatattatatatataataaacgttcacgtaaatacaaaacagagaacaaagtctagatttttgacttacataaatgtctgggatagtaaaatctatcatattgagcggaccatctggtttaggaaagacagccatagccaaaagactatgggaatatatttggatttgtggtgtcccataccactagatttcctcgtcctatggaacgagaaggtgttgattaccattacgttaacagagaggccatctggaagggaatagccgccggaaactttctagaacatactgagtttttaggaaatatttacggaacttctaaaacagctgtgaatacagcggctattaataatcgtatttgtgtgatggatctaaacatcgacggtgttagaagtcttaaaaatacgtacctaatgccttactcggtgtatataagacctacctctcttaaaatggttgagaccaagcttcgtcgtagaaacactgaagctaacgatgagattcatcgtcgtgtgatgttggcaaaaactgacatggatgaggcaggtgaagccggtctattcgacactattatcattgaagatgatgtgaatttagcatatagtaagttaattcagatactacaggaccgtattagaatgtattttaacactaattagagacttaagacttaaaacttgataattaataatataactcgtttttatatgtgtctatttcaacgtctaatgtattagttaaatattaaaacttaccacgtaaaacttaaaatttaaaatgatatttcattgacagatagatcacacattatgaactttcaaggacttgtgttaactgacaattgcaaaaatcaatgggtcgttggaccattaataggaaaaggtggattcggtagtatttatactactaatgacaataattatgtagtaaaaatagagcccaaagctaacggatcattatttaccgaacaggcattttatactagagtacttaaaccatccgttatcgaagaatggaaaaaatctcacaatataaagcacgtaggtcttatcacgtgcaaggcatttggtctatacaaatccattaatgtggaatatcgattcttggtaattaatagattaggtgcagatctagatgcggtgatcagagccaataataatagactaccaaaaaggtcggtgatgttgatcggaatcgaaatcttaaataccatacaatttatgcacgagcaaggatattctcacggagatattaaagcgagtaatatagtcttagatcaaatagataagaataaattatatctagtggattacggattggtttctaaattcatgtctaatggcgaacatgttccatttataagaaatccaaataaaatggataacggtactctagaatttacacctatagattcgcataaaggatacgttgtatctagacgtggagatctagaaacacttggatattgtatgattagatggttgggaggtatcttaccatggactaagatatctgaaacaaagaattgtgcattagtaagtgccacaaaacagaaatatgttaacaatactgcgactttgttaatgaccagtttgcaatatgcacctagagaattgctgcaatatattaccatggtaaactctttgacatattttgaggaacccaattacgacaagtttcggcacatattaatgcagggtgtatattattaagtgtggtgtttggtcgataaaaattaaaaaataacttaatttattattgatctcgtgtgtacaaccgaaatcatggcgatgttttacgcacacgctctcggtgggtacgacgagaatcttcatgcctttcctggaatatcatcgactgttgccaatgatgtcaggaaatattctgttgtgtcagtttataataacaagtatgacattgtaaaagacaaatatatgtggtgttacagtcaggtgaacaagagatatattggagcactgctgcctatgtttgagtgcaatgaatatctacaaattggaaatccgatccatgatcaagaaggaaatcaaatctctatcatcacatatcgccacaaaaactactatgctctaagcggaatcgggtacgagagtctagacttgtgtttggaaggagtagggattcatcatcacgtacttgaaacaggaaacgctgtatatggaaaagttcaacatgattattctactatcaaagagaaggccaaagaaatgagtgcacttagtccaggacctatcatcgattaccacgtctggataggagattgtatctgtcaagttactgctgtggacgtacatggaaaggaaattatgaaaatgagattcaaaaagggtgcggtgcttccgatcccaaatctggtaaaagttaaacttggggagaatgatacagaaaatctttcttctactatatcggcggcaccatcgaggtaaccacctctctggaagacagcgtgaatcatgtactcatgaaacgtttggaaactatacgccatatgtggtctgttgtatatgatcattttgatattgtgaatggtaaagaatgctgttatgtgcatacgcattcatctaatcaaaatcctataccgagtactgtaaaaacaaatttgtacatgaagactatgggatcatgcattcaaatggattccatggaagctctagagtatcttagcgaactgaaggaatcaggtggatggagtcccagaccagaaatgcaggaatttgaatatccagatggagtggaagacactgaatcaattgagagattggcagaggagttcttcaatagatcagaacttcaggctggtgaatcagtcaaatttggtaattctattaattgttaaacatacatctgtttcagctaagcaactaagaacacgtatacggcagcagcttccttctatactctcatcttttaccaacacaaagggtggatatttgttcattggagttgataataatacacacaaagtatttggattcacggtgggttacgactacctcagactgatagagaatgatatagaaaagcatatcaaaagacttcgtgttgtgcatttctgtgagaagaaagaggacatcaagtacgcgtgtcgattcatcaaggtatataaacctggggatgagactacctcgacatacgtgtgcgctatcaaagtggaaagatgctgttgtgctgtgtttgcagattggccagaatcatggtatatggatactaatggtatcaagaagtattctccagatgaatgggtgtcacatataaaattttaattaatgtaactatagagaacaaataataaggttgtaatatcatatagacaataactaacaattaattagtaactgttatctcttttttaactaaccaactaactatatacctattaatacatcgtaattatagttcttaacatctattaatcattaattcgcttctttaattttttataaactaacattgttaattgaaaagggataacatgttacagaatataaattatatatggatttttttaaaaaggaaatacttgactggagtatatatttatctcttcattatatagcacgcgtgttttccaatttttccacatcccatataatacaggattataatctcgttcgaacatacgagaaagtggataaaacaatagttgattttttatctaggttgccaaatttattccatattttagaatatggggaaaatattctacatatttattctatggatgatgctaatacgaatattataattttttttctagatagagtattaaatattaataagaacgggtcatttatacacaatctcgggttatcatcatccattaatataaaagaatatgtatatcaattagttaataatgatcatccagataataggataagactaatgcttgaaaatggacgtagaacaagacattttttgtcctatatatcagatacagttaatatctatatatgtattttaataaatcatggattttatatagatgccgaagacagttacggttgtacattattacatagatgtatatatcactataagaaatcagaatcagaatcatacaatgaattaattaagatattgttaaataatggatcagatgtagataaaaaagatacgtacggaaacacaccttttatcctattatgtaaacacgatatcaacaacgtggaattgtttgagatatgtttagagaatgctaatatagactctgtagactttaatagatatacacctcttcattatgtctcatgtcgtaataaatatgattttgtaaagttattaatttctaaaggagcaaatgttaatgcgcgtaataaattcggaactactccattttattgtggaattatacacggtatctcgcttataaaactatatttggaatcagacacagagttagaaatagataatgaacatatagttcgtcatttaataatttttgatgctgttgaatctttagattatctattatccagaggagttattgatattaactatcgtactatatacaacgaaacatctatttacgacgctgtcagttataatgcgtataatacgttggtctatctattaaacaaaaatggtgattttgagacgattactactagtggatgtacatgtatttcggaagcagtcgcaaacaacaacaaaataataatggaagtactattgtctaaacgaccatctttgaaaattatgatacagtctatgatagcaattactaaacataaacagcataatgcagatttattgaaaatgtgtataaaatatactgcgtgtatgaccgattatgatactcttatagatgtacagtcgctacagcaatataaatggtatattttaagatgtttcgatgaaatagatatcatgaagagatgttatataaaaaataaaactgtattccaattagttttttgtatcaaagacattaatactttaatgagatacggtaaacatccttctttcgtgaaatgcactagtctcgacgtatacggaagtcgtgtacgtaatatcatagcatctattagatatcgtcagagattaattagtctattatccaagaagctggatcctggagataaatggtcgtgttttcctaacgaaataaaatataaaatattggaaaactttaacgataacgaactatccacatatctaaaaatcttataaacattattaaaatataaaatctaagtaggataaaatcacactacatcattgtttccttttagtgctcgacagtgtatactatttttaacgctcataaataaaaatgaaaacgatttccgttgttacgttgttatgcgtactacctgctgttgtttattcaacatgtactgtacccactatgaataacgctaaattaacgtctaccgaaacatcgtttaatgataaccagaaagttacgtttacatgtgatcagggatatcattctttggatccaaatgctgtctgtgaaacagataaatggaaatacgaaaatccatgcaaaaaaatgtgcacagtttctgattatgtctctgaactatataataaaccgctatacgaagtgaattccaccatgacactaagttgcaacggcgaaacaaaatattttcgttgcgaagaaaaaaatggaaatacttcttggaatgatactgttacgtgtcctaatgcggaatgtcaacctcttcaattagaacacggatcgtgtcaaccagttaaagaaaaatactcatttggggaatatatgactatcaactgtgatgttggatatgaggttattggtgcttcgtacataagttgtacagctaattcttggaatgttattccatcatgtcaacaaaaatgtgatatgccgtctctatctaacggattaatttccggatctacattttctatcggtggcgttatacatcttagttgtaaaagtggttttacactaacggggtctccatcatccacatgtatcgacggtaaatggaatcccatactcccaatatgtgtacgaactaacgaaaaatttgatccagtggatgatggtcccgacgatgagacagatttgagcaaactctcgaaagacgttgtacaatatgaacaagaaatagaatcgttagaagcaacttatcatataatcatagtggcgttgacaattatgggcgtcatatttttaatctccgttatagtattagtttgttcctgtgacaaaaataatgaccaatataagttccataaattgctaccgtaaatataaatccgttaaaataattaataatttaataacaaacaagtatcaaaagattaaagacttatagctagaatcaattgagatgtcttcttcagtggatgttgatatctacgatgccgttagagcatttttactcaggcactattataacaagagatttattgtgtatggaagaagtaacgccatattacataatatatacaggctatttacaagatgcgccgttataccgttcgatgatatagtacgtactatgccaaatgaatcacgtgttaaacaatgggtgatggatacacttaatggtataatgatgaatgaacgcgatgtttctgtaagcgttggcaccggaatactattcatggaaatgtttttcgattacaataaaaatagtatcaacaatcaactaatgtatgatataattaatagcgtatctataattctagctaatgagagatatagaagcgcttttaacgacgatggtatatacatccgtagaaatatgattaacaagttgtacggatacgcatctctaactactattggcacgatcgctggaggtgtttgttattatctgttgatgcatctagttagtttgtataaataattatttcaatatactagttaaaattttaagattttaaatgtataaaaaactaataacgtttttatttgtaataggtgcattagcatcctattcgaataatgagtacactccgtttaataaactgagtgtaaaactctatatagatggagtagataatatagaaaattcatatactgatgataataatgaattggtgttaaattttaaagagtacacaatttctattattacagagtcatgcgacgtcggatttgattccatagatatagatgttataaacgactataaaattattgatatgtataccattgactcgtctactattcaacgcagaggtcacacgtgtagaatatctaccaaattatcatgccattatgataagtacccttatattcacaaatatgatggtgatgagcgacaatattctattactgcagagggaaaatgctataaaggaataaaatatgaaataagtatgatcaacgatgatactctattgagaaaacatactcttaaaattggatctacttatatatttgatcgtcatggacatagtaatacatattattcaaaatatgatttttaaaaatttaaaatatattatcacttcagtgacagtagtcaaataacaaacaacaccatgagatatattataattctcgcagttttgttcattaatagtatacatgctaaaataactagttataagtttgaatccgtcaattttgattccaaaattgaatggactggggatggtctatacaatatatcccttaaaaattatggcatcaagacgtggcaaacaatgtatacaaatgtaccagaaggaacatacgacatatccgcatttccaaagaatgatttcgtatctttctgggttaaatttgaacaaggcgattataaagtggaagagtattgtacgggactatgcgtcgaagtaaaaattggaccaccgactgtaacattgactgaatacgacgaccatatcaatttgtacatcgagcatccgtatgctactagaggtagcaaaaagattcctatttacaaacgcggtgacatgtgtgatatctacttgttgtatacggctaacttcacattcggagattctaaagaaccagtaccatatgatatcgatgactacgattgcacgtctacaggttgcagcatagactttgtcacaacagaaaaagtgtgcgtgacagcacagggagccacagaagggtttctcgaaaaaattactccatggagttcgaaagtatgtctgacacctaaaaagagtgtatatacatgcgcaattagatccaaagaagatgttcccaatttcaaggacaaaatggccagagttatcaagagaaaatttaatacacagtctcaatcttatttaactaaatttctcggtagcacatcaaatgatgttaccacttttcttagcatgcttaacttgactaaatattcataactaatttttattaatgatacaaaaacgaaataaaactgcatattatacactggttaacgcccttataggctctaaccattttcaagatgaggtccctgattatagtccttctgttcccctctatcatctactccatgtctattagacgatgtgagaagactgaagaggaaacatggggattgaaaatagggttgtgtataattgccaaagatttctatcccgaaagaactgattgcagtgttcatctcccaactgcaagtgaaggattgataactgaaggcaatggattcagggatatacgaaacaccgataaattataaaaaaagcaatgtgtccgctgtttccgttaataatactattttcgtaactggcggattattcataaataactctaatagcacgatcgtggttaacaatatggaaaaacttgacatttataaagacaaacaatggtcgattatagaaatgcctatggctagggtatatcacggcattgactcgacatttggaatgttatattttgccggaggtctatccgttaccgaacaatatggtaatttagagaaaaacaacgagatatcttgttacaatcctagaacgaataagtggtttgatatttcatatactatttataagatatccatatcatcattgtgtaaactaaataacgtcttctatgtatttagtaaggacattggatatgtggaaaagtatgatggtgcatggaagttagtacatgatcgtctccccgctataaaggcattatcaacttctccttattgattgaaaatgaaaatataaatagtttttatgtatagcagtattaccctatagttttattgcttactactaacatggatacagatgttacaaatgtagaagatatcataaatgaaatagatagagagaaagaagaaatactaaaaaatgtagaaattgaaaataataaaaacattaacaagaatcatcccaatgaatatattagagaagcactcgttattaataccagtagtaatagtgattccattgataaagaagttatagaatgtatcagtcacgatgtaggaatatagatcatatctactaatttttataatcgatacaaaacataaaaaacaactcgttattacatagcaggcatggaatccttcaagtattgttttgataacgatggcaagaaatggattatcggaaatactttatattctggtaattcaatactctataaggtcagaaaaaatttcactagttcgttctacaattacgtaatgaagatagatcacaaatcacacaagccattgttgtctgaaatacgattctatatatctgtattggatcctttgactatcgacaactggacacgggaacgtggtataaagtatttggctattccagatctgtatggaattggagaaaccgatgattatatgttcttcgttataaagaattcgggaagagtattcgccccaaaggatactgaatcagtcttcgaagcatgcgtcactatgataaacacgttagagtttatacactctcgaggatttacccatggaaaaatagaaccgaggaatatactgattagaaataaacgtctttcactaattgactattctagaactaacaaactatacaagagtggaaactcacatatagattacaacgaggacatgataacttcaggaaatatcaattatatgtgtgtagacaatcatcttggagcaacagtttcaagacgaggagatttagaaatgttgggatattgcatgatagaatggttcggtggcaaacttccatggaaaaacgaaagtagtataaaagtaataaaacaaaaaaaagaatataaaaaatttatagctactttctttgaggactgttttcctgaaggaaatgaacctctggaattagttagatatatagaattagtatacacgttagattattctcaaactcctaattatgacagactacgtaaactgtttatacaagattgaaattatattcttttttttatagagtgtggtagtgttacggatatctaatattaatattagactatctctatcgcgctacacgaccaatatcgattactatggatatcttctatgaaaggagagaatgtatttatttctccagcgtcaatctcgtcagtattgacaatactgtattatggagctaatggatccactgctgaacagctatcaaaatatgtagaaacggaggagaacacggataaggttagcgctcagaatatctcattcaaatccatgaataaagtatatgggcgatattctgccgtgtttaaagattcctttttgagaaaaattggcgataagtttcaaactgttgacttcactgattgtcgcactatagatgcaatcaacaagtgtgtagatatctttactgaggggaaaatcaatccactattggatgaaccattgtctcctagcaattagtgccgtatactttaaagcaaaatggttgacgccattcgaaaaggaatttaccagtgattatcccttttacgtatctccgacggaaatggtagacgtaagtatgatgtctatgtacggcaaggcatttaatcacgcatctgtaaaagaatcattcggcaacttttcaatcatagaactgccatatgttggagatactagtatgatggtcattcttccagacaagattgatggattagaatccatagaacaaaatctaacagatacaaattttaagaaatggtgtgactttatggatgctatgtttatagatgttcacattcccaagtttaaggtaacaggctcgtataatctggtggatactctagtaaagtcaggactgacagaggtgttcggttcaactggagattatagcaatatgtgtaatttagatgtgagtgtcgacgctatgatccacaaaacgtatatagatgtcaatgaagagtatacagaagcagctgcagcaacttctgtactagtggcagactgtgcatcaacaattacaaatgagttctgtgcagatcatccgttcatctatgtgattaggcatgttgatggaaaaattcttttcgttggtagatattgctctccgacaactaattgttaaccattttttttaaaaaaaatagaaaaaacatgtggtattagtgcaggtcgttgttcttccaattgcaattggtaagatgacggccaactttagtacccacgtcttttcaccacagcactgtggatgtgacagactgaccagtattgatgacgtcaaacaatgtttgactgaatatatttattggtcgtcctatgcataccgcaacaggcaatgcgctggacaattgtattccacactcctctcttttagagatgatgcggaattagtgttcatcgacattcgcgagctggtaaaaaatatgccgtgggatgatgtcaaagattgtacagaaatcatccgttgttatataccggatgagcaaaaaaccatcagagagatttcggccatcatcggactttgtgcatatgctgctacttactggggaggtgaagaccatcccactagtaacagtctgaacgcattgtttgtgatgcttgagatgctaaattacgtggattataacatcatattccggcgtatgaattgatgagttgtacatcttgacattttctttcttctcttctccctttcttctcttctcccttcctccctcttctccctttcccagaaacaaacttttttacccactataaaataaaatgagtatactacctattatatttcttcctatatttttttattcttcattcgttcagacttttaacgcgtctgaatgtatcgacaaagggcaatattttgcatcattcatggagttagaaaacgagccagtaatcttaccatgtcctcaaataaatacgctatcatccggatataatatattagatattttatgggaaaaacgaggagcggataatgatagaattataccgatagataatggtagcaatatgctaattctgaacccgacacaatcagactctggtatttatatatgcattaccacgaacgaaacctactgtgacatgatgtcgttaaatttgacaatcgtgtctgtctcagaatcaaatatagatcttatctcgtatccacaaatagtaaatgagagatctactggcgaaatggtatgtcccaatattaatgcatttattgctagtaacgtaaacgcagatattatatggagcggacatcgacgccttagaaataagagacttaaacaacggacacctggaattattaccatagaagatgttagaaaaaatgatgctggttattatacatgtgttttagaatatatatacggtggcaaaacatataacgtaaccagaattgtaaaattagaggtacgggatagaataataccttctactatgcaattaccagatggcattgtaacttcaataggtagtaatttgactattgcatgcagagtatcgttgagacctcccacaacggacaccgacgtcttttggataagtaatggtatgtattacgaagaagatgatggggacggaaacggtagaataagtgtagcaaataaaatctatatgaccgataagagacgtgttattacatcccggttaaacattaatcctgtcaaggaagaagatgctacaacgtttacgtgtatggcgtttactattcctagcatcagcaaaacagttactgttagtataacgtgaatgtatgttgttacatttccatgtcaattgagtttataagaatttttatacattatcttccaacaaacaattgacgaacgtattgctatgattaactcccacgatactatgcatattattaatcattaacttgcagactatacctagtgctattttgacatactcgtgttcttgtgtaattgcggtatctatattattaaagtacgtaaatctagctatagttttattatttaattttagataatataccgtctccttatttttaaaaattgccacatcctttattaaatcatgaatgggaatttctatgtcatcgttagtatattgtgaacaacaagagcagatatctataggaaagggtggaatgcgatacattgatctatgtagttttaaaacacacgcgaactttgaagaatttatataaatcattccatcgatacatccttctatgttgacatgtatatatccaggaattcttttattaatgtcaggaaatgtataaactaaaacattgcccgaaagcggtgcctctatctgcgttatatccgttcttaacttacaaaatgtaaccaatacctttgcatgacttgttttgttcggcaacgttagtttaaacttgacgaatggattaattacaatagcatgatccgcgcatctattaagtttttttactttaacgcccttgtatgtttttacagagactttatctaaatttctagtgcttgtatgtgttataaatataacgggatatagaaccgaatcacctaccttagatacccaattacattttatcagatccagataataaacaaattttgtcgccctaactaattctatattgttatatattttacaattggttatgatatcatgtaataacttggagtctaacgcgcatcgtcgtacgtttatacaattgtgatttagtgtagtatatctacacatgtatttttccgcactatagtattctggactagtgataaaactatcgttatatctgtcttcaatgaactcatcgagatattgctctctgtcatattcatacacctgcataaactttctagacatcttacaatccgtgttattttaggatcatatttacatatttacgggtatatcaaagatgttagattagttaatgggaatcgtctataataatgaatattaaacaattatatgaggacttttaccacaaagcatcataaaaatgagtcgtcgtctgatttatgttttaaatatcaaccgcaaatcaactcataaaatacaagagaatgaaatatatacatattttagtcattgcaatatagaccatacttctacagaacttgattttgtagttaaaaactatgatctaaacagacgacaacctgtaactgggtatactgcactacactgctatttgtataataattactttacaaacgatgtactgaagatattattaaatcatgacgtaaatgtaacgatgaaaaccagtagcggacgtatgcctgtttatatattgcttactagatgttgtaatatttcacatgatgtagtgatagatatgatagacaaagataaaaaccacttattacatagagactattccaacctattactagagtatataaaatctcgttacatgttattgaaggaagaggatatcgatgagaacatagtatccactttattagataagggaatcgatcctaactttaaacaagacggatatacagcgttacattattattatttgtgtctcgcacacgtttataaactaggtgagtgtagaaaaccgataacgataaaaaaggccaagcgaattatttctttgtttatacaacatggagctaatctaaacgcgttagataattgtggtaatacaccattccatttgtatcttagtattgaaatgtgtaataatattcatatgactaaaatgctgttgacttttaatccgaatttcaaaatatgtaataatcatggattaacgcctatactatgttatataacttccgactacatacaacacgatattcttgttatgttaatacatcactatgaaacaaatgttggagaaatgccgatagatgagcgtcgtatgatcgtattcgagtttatcaaaacatattctacacgtccggcagattcgataacttatttgatgaataggtttaaaaatataaatatttatacccgctatgaaggaaagacattattacacgtagcatgtgaatataataatacacaagtaatagattatcttatacgtatcaacggagatataaatgcgttaaccgacaataacaaacacgctacacaactcattatagataacaaagaaaattccccatataccattaattgtttactgtatatacttagatatattgtagataagaatgtgataagatcgttggtggatcaacttccatctctacctatcttcgatataaaatcatttgagaaattcatatcctactgtatacttttagatgacacattttacgataggcacgttaagaatcgcgattctaaaacgtatcgatacgcattttcaaaatacatgtcgtttgataaatacgatggtataataactaaatgtcacgacgaaacaatgttactcaaactgtccactgttctagacactacactatatgcagttttaagatgtcataattcgagaaagttaagaagatacctcaacgagttaaaaaaatataataacgataagtcctttaaaatatattctaatattatgaatgagagataccttaatgtatattataaagatatgtacgtgtcaaaggtatatgataaactatttcctgttttcacagataaaaattgtctactaacattactaccttcagaaattatatacgaaatattatacatgctgacaattaacgatctttataatatatcgtatccacctaccaaagtatagttgtatttttctcatgcgatgtgtgtaaaaaaactgatattatataaatattttagtgccgtataataaagatgacgatgaaaatgatggtacatatatatttcgtatcattattgttattgctattccacagttacgccatagacatcgaaaatgaaatcacagaattcttcaataaaatgagagatactctaccagctaaagactctaaatggttgaatccagcatgtatgttcggaggcacaatgaatgatatagccgctctaggagagccattcagcgcaaagtgtcctcctattgaagacagtcttttatcgcacagatataaagactatgtggttaaatgggagaggctagaaaagaatagacggcgacaggtttctaataaacgtgttaaacatggtgatttatggatagccaactatacatctaaattcagtaaccgtaggtatttgtgcaccgtaactacaaagaatggtgactgtgttcagggtatagttagatctcatattaaaaaacctccttcatgcattccaaaaacatatgaactaggtactcatgataagtatggcatagacttatactgtggaattctttacgcaaaacattataataatataacttggtataaagataataaggaaattaatatcgacgacattaagtattcacaaacgggaaaggaattaattattcataatccagagttagaagatagcggaagatacgactgttacgttcattacgacgacgttagaatcaagaatgatatcgtagtatcaagatgtaaaatacttacggttataccgtcacaagaccacaggtttaaactaatactagatccgaaaatcaacgtaacgataggagaacctgccaatataacatgcactgctgtgtcaacgtcattattgatcgacgatgtactgattgaatgggaaaatccatccggatggcttataggattcgattttgatgtatactctgttttaactagtagaggcggtatcaccgaggcgaccttgtactttgaaaatgttactgaagaatatataggtaatacatataaatgtcgtggacacaactattattttgaaaaaacccttacaactacagtagtattggagtaaatatacaatgcatttttatatacattactgaattattattactgaattattattactgaattattattaattatatcgtatttgtgctatagaatggatgaagatacgcgactatctaggtatttgtatctcaccgatagagaacatataaatgtagactctattaaacagttgtgtaaaatatcagatcctaatgcatgttatagatgtggatgtacggctttacatgagtacttttataattatagatcagtcaacggaaaatacaagtatagatacaacggttactatcaatattattcatctagcgattatgaaaattataatgaatattattatgatagaactggtatgaacagtgagagtgataatatatcaatcaaaacagaatatgaattctatgatgaaacacaagatcaaagtacacaactagtaggttacgacattaaactcaaaaccaatgaggatgattttatggctatgatagatcagtgggtgtccatgattatatagatgaatcaattaataaagtagtatatggaagagagtctcacgtaagatggcgggatatatggcaagaacataatgatggcgtatacagtataggaaaggagtgcatagataatatatacgaagacaaccataccgtagacgaattctacaagatagacagcgtatcagatgtagatgacgcggaacacatatctccgataactaaaaaaccatagaatcagttgatgataatacctacatttctaatcttccgtataccatcaaatacaaaatattcgagcaacaataagtattttttatacctttaaaactgataaataaattttttctagtgatattttggcaagatgagaatcctatttctcatcgctttcatgtatgggtgtgttcactcatatgttaacgcggttgaaaccaaatgtccaaatctagacattgtaacatcttctggagaatttcattgttcaggatgtgtggaacatatgcctgagtttagctatatgtattggttggcaaaggatatgaaatcggacgaggataccaagtttatagaacatctgggtgatggcatcaaagaagatgaaaccgttcgtaccacagatagtggaatcgtcactctacgtaaagtccttcatgtgactgatactaataaatttgataattataggttcacttgtgtcctcgctacgctagatggcatttataaaaagaatgtttgctgaagtagttgtgtgctactatttttatttatgatataatctaatggaattaatttgaattgatatttatccaatactaaagattatattagaatcaaattaatcttttatacgagaaaaaataacgacatacgtcgtcaacaaattaaactttttatttattagttaactagcttatagaacttgctcattgttatgtttctaaaacgggtacggcatataggacaattatccgacgcaccggtttctcttcgtgttctatgccatatattgatgcatgttatgcaaaatatatgagtacacgaatccaataaaccaaagtatctatcgttttgagtaaacaacttcatagcaaattccacattctttttctttacttactctatacacgtcctcgtatttatttagtattttgatgatatccaactcagaaatggttgttgtattattgggtgtatttggagtataggtattattagctatgtaccaatttaccaaccctcttaatattgattgataatcacatcggttatccaattaataactaaattgtagtgtatatatagaccatatatgtttctatttttttgacagttacgtatagtttcagtaagttttgattgttgtattcctgtatctctagataagttagtcatatagtcccttccggcgatacgttttttccaagcccgaaattgattagccaaatgtgtatttatttttgtgatattgatataatatttcggataatgcatactgttagtcttatatcatttggttcatctatgtattgtaatattgttacatgatctatagatgatgtattgattttggcaggatcgaattccatatccgcgactaaacagtgaaaaaaatgtaaatactttttaaattttaaattagtaaaacttttttttattttttatgattccaaaaatactgaatacaaagtcctaaattataaatatggagatcatactaccacaacttattattatgtatacaaggccggtgtaatagatagatatatataattctattacaccggcagacaattaccgaccggtatttgtcgttaccaacataccgtataatatgtaatatacaattccataacccattgacagttgttatacatcaaaattgcaattcttttgattacgatgttataagaatgtagttaattgatgtatgatgttaatgtgtcctctttcctcttataacatcgtaatcaaaaacttttttataatatatacctaataatgtgtcttaatagttctcgtgattcgtcaaacaatcattcttataaaatataataaagcaacgtaaaaacacataaaaataagcgtaactaataagacaatggatatttacgacgataaaggtctacagactattaaactgtttaataatgaatttgattgtataaggaatgacatcagagaattatttaaacatgtaactgattccgatagtatacaacttccgatggaagacaattctgatattatagaaaatatcagaaaaatactatatagacgattaaaaaatgtagaatgtgttgacatcgataacacaataacttttatgaaatacgatccaaatgatgataataagcgtacgtgttctaattgggtacccttaactaataactatatggaatattgtctagtaatatatttggaaacaccgatatgtggaggcaaaataaaattataccaccctacaggaaatataaagtcggataaggatattatgtttgcaaagactctagactttaaatcaacgaaagtgttaactggacgtaaaacaattgccgttctagacatatccgtttcatataatagatcaatgactactattcactacaacgacgacgttgatatagatatacatactgataaaaatggaaaagagttatgttattgttatataacaatagatgatcattacttggttgatgtggaaactataggagttatagtcaatagatctggaaaatgtctgttagtaaataaccatctaggtataggtatcgttaaagataaacgtataagcgatagttttggagatgtatgtatggatacaatatttgacttttctgaagcacgagagttattttcattaactaatgatgataacaggaatatagcatgggacactgataaactagacgatgatacagatatatggactcccgtcacagaagatgattacaaatttctttctagactagtattgtatgcaaaatctcaatcggatactgtatttgactattatgttcttactggtgatacggaaccacccactgtattcattttcaaggtaactagattttactttaatatgccgaaataaaaaatttttgtataatatctagaggtagaggtattgtttagataaatacaaataacatagatacatcgcatacttagcatttttataaatatacataagacatacactttatacatttttgtaaaaatactcataaaaaaatttataaaaattatggcacaaccatatcttgtataggtagtttagttcgtcgagtgaacctataaacagataatagacaacacataataatgcctactaatacaagcataataccgggagatgggatatatgacgttgtagtgtttgggttttctgaacgttgatagtctactaatactacatgctgacatctaatgcctgtataaccatgagagcatctacaatacataccgtcaatatctctagcgtggatacagtcaccgtgtaaacaatatccatctccctctggaccgcataatctgatagctggaatatctgttgtagcgtttgtaatttctggcaatgtcgtttcgatagcgttaccactatcggcgaatgatctgattatcatagcagcgaacaacaacatcagataatttatcaacatttttgatggattctgtgtttatgctgtttctcagtgtgtgtttatgacaagattgggaattttatattattaattcagtaatataaactaataatatattgttaattgtgtaaataatataaaaataacaatacaatattgaatgtgttgctgttaaaaatgtatgtgttaatataatagaataaaataaatgagtatgatcattttagataacgattgattttatcattaccgcttcattcttatattctttgcttacggaacctatatttagaaacatctactaacaattttttatgcttgcattattaatggtatgtaatatgattgattgtgtacgcaataccaatttgttaagtatgaatacggggtacaaacataaattgaaatttaacattatttatttatgatatatatcgttatcgttaggtctataccatggatatctttaaagaactaatcttaaaacaccctgatgaaaatgttttgatttctccagtttccattttatctactttatctattctaaatcatggagcagctggttctacagctgaacaactatcaaaatatatagagaatatgaatgagaatacacccgatgacaataatgatgacatggaggtagatattccgtattgtgcgacactagctaccgcaaataaaatatacggtagcgatagtatcgagttccacgcctccttcctacaaaaaataaaagacgattttcaaactgtaaactttaataatgctaaccaaacaaaggaactaatcaacgaatgggttaagacaatgacaaatggtaaaattaattccttattgactagtccgctatccattaatactcgtatgacagttgttagcgccgtccattttaaagcaatgtggaaatatccattttctaaacatcttacatatacagacaagttttatatttctaagaatatagttaccagcgttgatatgatggtgggtaccgagaataacttgcaatatgtacatattaatgaattattcggaggattctctattatcgatattccatacgagggaaactctagtatggtaattatactaccggacgacatagaaggtatatataacatagaaaaaaatataacagatgaaaaatttaaaaaatggtgtggtatgttatctactaaaagtatagacttgtatatgccaaagtttaaagtggaaatgacagaaccgtataatctggtaccgattttagaaaatttaggacttactaatatattcggatattatgcagattttagcaagatgtgtaatgaaactatcactgtagaaaaatttctacatacgacgtttatagatgttaatgaggagtatacagaagcatcggccgttacaggagtatttacgattaacttttcgatggtatatcgtacgaaggtctacataaaccatccattcatgtacatgattaaagacaccacaggacgtatactttttatagggaaatactgctatccgcaataaatataaacaaatagacttttataaagagtcttcaacgataagtatatcgacatactacttatgctgcgaaagattctgaacgagaacgactatctcaccctcttggatcatatccgcactgctaaatactaaatctccactacactttttatcatcttatgaggaatgattgccttcgtgaaataggaataattagcaccagaatagctatggattattgtggtagagagtgcactattctatgtcgtctactggatgaagatgtgacgtacaaaaaaataaaactagaaattgaaacgtgtcacaacttatcaaaacatatagatagacgaggaaacaatgcgctacattgttacgtctccaataaatgcgatacagacattaagattgttctctcgcggagtcgagagactttgtagaaacaacgaaggattaactccgctaggagtatacagtaagcatagatacgtaaaatctcagattgtgcatctactgatatccagctattcaaattcctctaacgaactcaagtcgaatataaatgatttcgatctgtattcggataatatcgacttacgtctgctaaaatacctaattgtggataaacggatacgtccgtccaagaatacgaattatgcaatcaatggtctcggattggtggatatatacgtaacgacgcctaatccgagaccagaagtattgctatggcttcttaaatcagaatgttacagcaccggttacgtatttcgtacctgtatgtacgacagtgatatgtgtaagaactctcttcattactatatatcgtctcatagagaatctcaatctctatccaaggatgtaattaaatgtttgatcgataacaatgtttccatccatggcagagacgaaggaggatctttacccatccaatactactggtctttctcaaccatagatatagagattgttaaattattattaataaaggatgtggacacgtgtagagtatacgacgtcagccctatattagaggcgtattatctaaacaagcgatttagagtaaccccatataatgtagacatggaaatcgttaatcttcttattgagagacgtcatactcttgtcgacgtaatgcgtagtattacttcgtacgattccagagaatataaccactacatcatcgataacattctaaagagatttagacaacaggatgaatccatcgtacaagccatactgataaactacttacattacggcgatatggtcgttcgatgcatgttagataacggacaacaactatcctctacacgactactttgttaataataatctcgtcgatgtaaacgtcgtaaggtttatcgtggaaaatatggacacgcggctgtaaatcacgtatcgaacaatggccgtctatgtatgtacggtctgatattatcgagatttaataattgcgggtatcactgttatgaaaccatactgatagatgtatttgatatactaagcaagtacatggatgatatagatatgatcgataactctactatattacgcggtcgatgtcaataatatacaatttgcaaagcggttattggaatatggagcgagtatcacgctcgataatcaatacggccatccagaaaagcagttacagaagagaaaacaaaacgaaatcgttgttctacaagatgtctctccctacgacgattactacgtaaaaaagatactagcctactgcctattaagggacgagtcattcgcggaactacatagtaaattctgtttaaacgaggactataaaagtgtatttatgaaaaatatatcattcgataagatagattccatcatcgtgacataagtcgcctcaaagagattcgaatctccgacaccgacctgtatacggtatcacagctatcttaaagccatacattcagacagtcacatttcatttcccatgtacgacgatctcatagaacagtgccatctatcgatggagcgtaaaagtaaactcgtcgacaaagcactcaataaattagagtctaccatcggtcaatctagactatcgtatttgcctccggaaattatgcgcaatatcatctaaacagtatgttgtacggaaagaaccattacaaatattatccatgatagaaagaaaatatctatatgattggagaagtaggaaacaggaacaagacaacgattactacattattaaatcatgaagtccgtattatactcgtatatattgtttctctcatgtataataataaacggaagagatatagcaccgcatgcaccatccgatggaaagtgtaaagacaacgaatacaaacgccataatttgtgtccgggaacatacgcttccagattatgcgatagcaagactaacacacgatgtacgccgtgtggttcgggtaccttcacatctcgcaataatcatttacccgcttgtctaagttgtaacggaagacgcgatcgtgtaacacgactcacaatagaatctgtgaatgctctcccggatattattgtcttctcaaaggatcatccggatgcaaggcatgtgtttcccaaacaaaatgtggaataggatacggagtatccggagacgtcatctgttctccgtgtggtctcggaacatattctcacaccgtctcttccgcagataaatgcgaacccgtacccagaaatacgtttaactatatcgatgtggaaattaacctgtatccagttaacgacacgtcgtgtactcggacgaccactaccggtctcagcgaatccatctcaacgtcggaactaactattactatgaatcataaagactgtaatcccgtatttcgtgatggatacttctccgttcttaataaggtagcgacttcaggtttctttacaggagaaaggtgtgcactctgaatttcgagattaaatgcaataacaaagattcttcctccaaacagttaacgaaagcaaagaatgatactatcatgccgcattcggagacagtaactctagtgggcgacatctatatactatatagtaataccaatactcaagactacgaaactgatacaatctcttatcatgtgggtaatgttctcgatgtcgatagccatatgcccggtagttgcgatatacataaactgatcactaattccaaacccacccactttttatagtaagtttttcacccataaataataaatacaataattaatttctcgtaaaagtagaaaatatattctaatttattgcacggtaaggaagtagaatcataaagaacagtactcaatcaatagcaattatgaaacaatatatcgtcctggcatgcatgtgcctggcggcagctgctatgcctgccagtcttcagcaatcatcctcatcctcctcctcgtgtacggaagaagaaaacaaacatcatatgggaatcgatgttattatcaaagtcacaaagcaagaccaaacaccgaccaatgataagatttgccaatccgtaacggaaattacagagtccgagtcagatccagatcccgaggtggaatcagaagatgattccacatcagtcgaggatgtagatcctcctaccacttattactccatcatcggtggaggtctgagaatgaactttggattcaccaaatgtcctcagattaaatccatctcagaatccgctgatggaaacacagtgaatgctagattgtccagcgtgtccccaggacaaggtaaggactctcccgcgatcactcatgaagaagctcttgctatgatcaaagactgtgaagtgtctatcgacatcagatgtagcgaagaagagaaagacagcgacatcaagacccatccagtactcgggtctaacatctctcataagaaagtgagttacgaagatatcatcggttcaacgatcgtcgatacaaaatgcgtcaagaatctagagtttagcgttcgtatcggagacatgtgcaaggaatcatctgaacttgaggtcaaggatggattcaagtatgtcgacggatcggcatctgaaggtgcaaccgatgatacttcactcatcgattcaacaaaactcaaagcgtgtgtctgaatcgataactctattcatctgaaattggatgagtagggttaatcgaacgattcaggcacaccacgaattaaaaaagtgtaccggacactatattccggtttgcaaaacaaaaatgttcttaactacattcacaaaaagttacctctcgcgacttcttctttttctgtctcaatagtgtgatacgattatgacactattcctattcctattcctatttcctttcagagtatcacaaaaatattaaacctctttctgatggtctcataaaaaaagttttacaaaaatatttttattctctttctctctttgatggtctcataaaaaaagttttacaaaaatatttttattctctttctctctttgatggtctcataaaaaaagttttacaaaaatatttttattctctttctctctttgatggtctcataaaaaaagttttacaaaaatatttttattctctttctctctttgatggtctcataaaaaaagttttacaaaaatatttttattctctttctctctttgatggtctcataaaaaaagttttacaaaaatatttttattctctttctctctttgatggtctcataaaaaaagttttacaaaaatatttttattctctttctctctttgatggtctcataaaaaaagttttacaaaaatatttttattctctttctctctttgatggtctcataaaaaaagttttacaaaaatatttttattctctttctctctttgatggtctcataaaaaaagttttacaaaaatatttttattctctttctctctttgatggtctcataaaaaaagttttacaaaaatatttttattctctttctctctttgatggtctcataaaaaaagttttacaaaaatatttttattctctttctctctttgatggtctcataaaaaagttttacaaaaatatttttattctctttctctctttgatggtctcataaaaaagttttacaaaaatatttttattctctttctctctttgatggtctcataaaaaaagttttacaaaaatatttttattctctttctctctttgatggtctcataa

SEQ ID NO: 5 - DNA, 183369 bp, Vaccinia virus
  LIVP 1.1.1
tttttttatgagaccatcaaagagagaaagagaataaaaatatttttgtaaaactttttttatgagaccatcaaagagagaaagagaataaaaatatttttgtaaaactttttttatgagaccatcaaagagagaaagagaataaaaatatttttgtaaaactttttttatgagaccatcaaagagagaaagagaataaaaatatttttgtaaaactttttttatgagaccatcaaagagagaaagagaataaaaatatttttgtaaaactttttttatgagaccatcaaagagagaaagagaataaaaatatttttgtaaaactttttttatgagaccatcaaagagagaaagagaataaaaatatttttgtaaaactttttttatgagaccatcaaagagagaaagagaataaaaatatttttgtaaaactttttttatgagaccatcaaagagagaaagagaataaaaatatttttgtaaaactttttttatgagaccatcaaagagagaaagagaataaaaatatttttgtaaaactttttttatgagaccatcagaaagaggtttaatatttttgtgatactctgaaaggaaataggaataggaataggaatagtgtcataatcgtatcacactattgagacagaaaaagaagaagtcgcgagaggtaactttttgtgaatgtagttaagaacatttttgttttgcaaaccggaatatagtgtccggtacacttttttaattcgtggtgtgcctgaatcgttcgattaaccctactcatccaatttcagatgaatagagttatcgattcagacacacgctttgagttttgttgaatcgatgagtgaagtatcatcggttgcaccttcagatgccgatccgtcgacatacttgaatccatccttgacctcaagttcagatgattccttgcacatgtctccgatacgaacgctaaactctagattcttgacacattttgtatcgacgatcgttgaaccgatgatatcttcgtaactcactttcttatgagagatgttagacccgagtactggatgtcgctgtctttctcttcttcgctacatctgatgtcgatagacacctcacagtctttgatcatagcaagagcttcttcatgagtccttaccttgtcctggggacacgctggacaatctagcattcactgtgtttccatcagcggattctgagatggatttaatctgaggacatttggtgaatccaaagttcattctcagacctccaccgatgatggagtaataagtggtaggaggatctacatcctcgactgatgtggaatcatcttctgattccacctcgggatctggatctgactcggactctgtaatttccgttacggattggcaaatcttatcattggtcggtgtttggtcttgctttgtgactttgataataacatcgattcccatatgatgtttgttttcttcttccgtacacgaggaggaggatgaggatgattgctgaagactggcaggcatagcagctgccgccaggcacatgcatgccaggacgatatattgtttcataattgctattgattgagtactgttctttatgattctacttccttaccgtgcaataaattagaatatattttctacttttacgagaaattaattattgtatttattatttatgggtgaaaaacttactataaaaagtgggtgggtttggaattagtgatcagtttatgtatatcgcaactaccgggcatatggctatcgacatcgagaacattacccacatgataagagattgtatcagtttcgtagtcttgagtattggtattactatatagtatatagatgtcgcccactagagttactgtctccgaatgcggcatgatagtatcattctttgctttcgttaactgtttggaggaagaatctttgttattgcatttaatctcgaaattcagagtgcacacctttctcctgtaaagaaacctgaagtcgctaccttattaagaacggagaagtatccatcacgaaagacgggattacagtctttatgattcatagtaatagttagttccgacgttgagatggattcgctgagaccggtagtggtcgtccgagtacacgacgtgtcgttgacgggatacaggttaatttccacatcgatatagttaaaggtatttctgggtacgggttcgcatttatctgcggaagagacggtgtgagaatatgttccgagaccacacggagaacagatgacgtctccggatactccgtatcctattccacattttgtttgggaaacacatgccttgcatccggatgatcctttgagaagacaataatatccgggagagcattcacagattctattgtgagtcgtgttacacgatcgcgtcttccgttacaacttagacaagcgggtaaatgattattgcgagatgtgaaggtacccgaaccacacggcgtacattgtgtgttagtcttgctatcgcataatctggaagcgtatgttcccggacacaaattatggcgtttgtattcgttgtctttacactttccatcggatggtgcatgcggtgctatatctcttccgtttattattatacatgagagaaacaatatatacgagtataatacggacttcatgatttaataatgtagtaatcgtcgtcttgttcctgtttcctacttctccaatcatatagatattttctttctatcatggataatatttgtaatggttctttccgtacaacatactgtttagatgatattgcgcataatttccggaggcaaatacgatagtctagattgaccgatggtagactctaatttattgagtgctttgtcgacgagtttacttttacgctccatcgatagatggcactgttctatgagatcgtcgtacatgggaaatgaaatgtgtctgtctgaatgtatggctttaagatagctgtgataccgtatacaggtcggtgtcggagattcgaatctctttaaggcgacttatgtcacgatgatggaatctatcttatcgaatgatatatttttcataaatacacttttatagtcctcgtttaaacagaatttactatgtagttccgcgaatgactcgtcccttaataggcagtaggctagtatcttttttacgtagtaatcgtcgtagggagagacatcttgtagaacaacgatttaatcataggtagagatactttcagtctgtggtggatgatgtcattcacaacatccgccttgtatatgatgtttctgttttcaaacaccaagtcgaataccgtctttagtcggaaggttgatgtcgtatccgatgtatgaggcaacattgttgttacaattttgaaaggcggtattatagtattcgtctttctgaatgtcgaacctatctaatagataccgtagtatattgagagtgtatccttgattatgttttatgaatagataaagtagatgttgtccttcttccttttgttcgtgccaattgagtaacattatgagaatatgacctgttgcacaatcgttccatgatgggtgtacaatcaagattattacgtatcctcgtatcggctcctcgagataaaagagcatacaccacacgaggactatgtttggtatactgttgaaggtaagtgtgtaaccgcgttaatgtttgctccataatctattatcgcgtagatgaatcgcttctcggctcgcatcttagtgtgacttaacttgtaataattgctttcgtagaacgtggatatgtgtttacagtagtaatgaagagaagtgagttcatcctcgtcggcgcaattagggtcggatcctttgtacagaacgtaatagtttaagctcccattgaatttatatctaagataacacagcaatagatcggatgatttactaaagtcatcaatggtgtccgttagtatatcaaagatcttgttatcgattgatagtggtcatccttgctatcaaagttacgcatgccgtggtgtaacaatatctttaatacagatggattaaatcgtgtattcatcgtatagcaatgtaatggagagttacctcgtttattcagatcgcagtgtttaataactagcttaaacagatgagacgatgtatccacatcaaagaacgtaaaatacatatgacagacattgttgacagaaacgtgaccttcattcttaccgtcgtccataaatacgttaggtatgtaccacatactgtcgcgaacgatgcgtacaatctcgtccatctcataatgatttactttttcataattaaagatgtgaaagaaaaccgaacaatatatttttttagtaatgtttatgcgagacatataaaataaactccgtgtttatgatgccggtaaatgtttttatcatcttggacggaatcgattttgtaatatgtcatggaaacaaatgaaacaggacattatcgctccatgataaattatttaatggagtaataaagtatctccatgggtaatttcgaaatcaagttatcgtctgtattaatgttgtccactatggagtcgatcctctcattgttctttacagtttctgtaatgatggacgttagttcttttttgtaccatttgatgtcggattctttgcgtatctcaatttgtggcgtttgcttcgtttaaataatatatcaaacatggagacgcctgatatgtagacattcttcattctattaatgtctactctatagcgctttagttccttatgacgaccggcgatatcatactttactttagaaggaaaatcatcatctaggattaaggcgtatctgatacaggcgaataatggttcaggatatagatagcgtatatctctattaaatgcgtcaatcatagtctctagagtgggatggtaactcagtaataaatcaactagcttcgttttgttttctctttggtaactgcttttctggatggccgtattgattatcgagcgtgacactcgctccatattccaataaccgctttgcaaattgtatattattgacatcgaccgcgtaatatagtagagttatcgatcatatctatatcatccatgtacttgcttagtatatcaaatacatctatcagtatggtttcataacagtgatacccgcaattattaaatctcgataatatcagaccgtacatacatagacggccattgttcgatacgtgatttacagccgcgtgtccatattttccacgataaaccttacgacgtttacatcgacgagattattattaacaaagtagtcgtgcagaggatagttgttgtccgttatctaacatgcatcgaacgaccatatcgccgtaatgtaagtagtttatcaacatggcttgtacatcctgttgtctaaatctctttagaatgttatcgatgatgtagtggttatattctctggaatcgtacgaagtaatactacgcattacgtcgacaagagtatgacgtctctcaataagaagattaacgatttccatgtctacattatatggggttactctaaatcgcttgtttagataatatagggctgacgtcgtatactctacacgtgtccacatcctttattaataataatttaacaatctctatatctatggttgagaaagaccagtagtattggatgggtaaagatcctccttcgtctctgccatggatggaaacattgttatcgatcaaacatttaattacatccttggatagagattgagattctctatgagacgatatatagtaatgaagagagttcttacacatatcactgtcgtacatacaggtacgaaatacgtaaccggtgctgtaacattctgatttaagaagccatagcaatacttctggtctcggattaggcgtcgttacgtatatatccaccaatccgagaccattgattgcataattcgtattcttggacggacgtatccgtttatccacaattaggtattttagcagacgtaagtcgatattatccgaatacagatcgaaatcatttatattcgacttgagttcgttagaggaatttgaatagctggatatcagtagatgcacaatctgagattttacgtatctatgcttactgtatactcctagcggagttaatccttcgttgtttctacaaagtctctcgactccgcgagagaacaatcttaatgtctgtatcgcatttattggagacgtaacaatgtagcgcattgtttcctcgtctatctatatgttttgataagttgtgacacgtttcaatttctagttttatttttttgtacgtcacatcttcatccagtagacgacatagaatagtgcactctctaccacaataatccatagctattctggtgctaattattcctatttcacgaaggcaatcattcctcataagatgataaaaagtgtagtggagatttagtatttagcagtgcggatatgatccaagagggtgagatagtcgttctcgttcagaatctttcgcagcataagtagtatgtcgatatacttatcgttgaagactctttataaaagtctatttgtttatatttattgcggatagcagtatttccctataaaaagtatacgtcctgtggtgtctttaatcatgtacatgaatggatggtttatgtagaccttcgtacgatataccatcgaaaagttaatcgtaaatactcctgtaacggccgatgcttctgtatactcctcattaacatctataaacgtcgtatgtagaaatttttctacagtgatagtttcattacacatcttgctaaaatctgcataatatccgaatatattagtaagtcctaaattttctaaaatcggtaccagattatacggttctgtcatttccactttaaactttggcatatacaagtctatacttttagtagataacataccacaccattttttaaatttttcatctgttatatttttttctatgttatatataccttctatgtcgtccggtagtataattaccatactagagtttccctcgtatggaatatcgataatagagaatcctccgaataattcattaatatgtacatattgcaagttattctcggtacccaccatcatatcaacgctggtaactatattcttagaaatataaaacttgtctgtatatgtaagatgtttagaaaatggatatttccacattgctttaaaatggacggcgctaacaactgtcatacgagtattaatggatagcggactagtcaataaggaattaattttaccatttgtcattgtcttaacccattcgttgattagttcctttgtttggttagcattattaaagtttacagtttgaaaatcgtcttttattttttgtaggaaggaggcgtggaactcgatactatcgctaccgtatattttatttgcggtagctagtgtcgcacaatacggaatatctacctccatgtcatcattattgtcatcgggtgtattctcattcatattctctatatattttgatagttgttcagctgtagaaccagctgctccatgatttagaatagataaagtagataaaatagaaactggagaaatcaaaacattttcatccgtgtgttttaagattagttctttaaagatatccatggtatagaccaaacaataacgataacgatatatatcataaataaataatgttaaatttcagtttatgtttgtaccccgtattcatacttaacaaattggtattgcgtacacaatcaatcatattacataccattaataatgcaagcataaaaaattgttagtagatgtttctaaatataggttccgtaagcaaagaatataagaatgaagcggtaatgataaaatcaatcgttatctaaaatgatcatactcatttattttattctattatattaacacatacatttttaacagcaacacattcaatattgtattgttatttttatattatttacacaattaacaatatattattagtttatattactgaattaataatataaaattcccaatcttgtcataaacacacactgagaaacagcataaacacagaatccatcaaaaatgttgataaattatctgatgttgttgttcgctgctatgataatcagatcattcgccgatagtggtaacgctatcgaaacgacattgccagaaattacaaacgctacaacagatattccagctatcagattatgcggtccagagggagatggatattgtttacacggtgactgtatccacgctagagatattgacggtatgtattgtagatgctctcatggttatacaggcattagatgtcagcatgtagtattagtagactatcaacgttcagaaaacccaaacactacaacgtcatatatcccatctcccggtattatgcttgtattagtaggcattattatgtgttgtctattatctgtttataggttcactcgacgaactaaactacctatacaagatatggttgtgccataatttttataaatttttttatgagtatttttacaaaaatgtataaagtgtatgtcttatgtatatttataaaaatgctaagtatgcgatgtatctatgttatttgtatttatctaaacaatacctctacctctagatattatacaaaaattttttatttcggcatattaaagtaaaatctagttaccttgaaaatgaatacagtgggtggttccgtatcaccagtaagaacataatagtcaaatacagtatccgattgagattttgcatacaatactagtctagaaagaaatttgtaatcatcttctgtgacgggagtccatatatctgtatcatcgtctagtttatcagtgtcccatgctatattcctgttatcatcattagttaatgaaaataactctcgtgcttcagaaaagtcaaatattgtatccatacatacatctccaaaactatcgcttatacgtttatctttaacgatacctatacctagatggttatttactaacagacattttccagatctattgactataactcctatagtttccacatcaaccaagtaatgatcatctattgttatataacaataacataactcttttccatttttatcagtatgtatatctatatcaacgtcgtcgttgtagtgaatagtagtcattgatctattatatgaaacggatatgtctagaacggcaattgttttacgtccagttaacactttcgttgatttaaagtctagagtctttgcaaacataatatccttatccgactttatatttcctgtagggtggtataattttattttgcctccacatatcggtgtttccaaatatattactagacaatattccatatagttattagttaagggtacccaattagaacacgtacgcttattatcatcatttggatcgtatttcataaaagttattgtgttatcgatgtcaacacattctacattttttaatcgtctatatagtatttttctgatattttctataatatcagaattgtcttccatcggaagttgtatactatcggaatcagttacatgtttaaataattctctgatgtcattccttatacaatcaaattcattattaaacagtttaatagtctgtagacctttatcgtcgtaaatatccattgtcttattagttacgcttatttttatgtgtttttacgttgctttattatattttataagaatgattgtttgacgaatcacgagaactattaagacacattattaggtatatattataaaaaagtttttgattacgatgttataagaggaaagaggacacattaacatcatacatcaattaactacattcttataacatcgtaatcaaaagaattgcaattttgatgtataacaactgtcaatgggttatggaattgtatattacatattatacggtatgttggtaacgacaaataccggtcggtaattgtctgccggtgtaatagaattatatatatctatctattacaccggccttgtatacataataataagttgtggtagtatgatctccatatttataatttaggactttgtattcagtatttttggaatcataaaaaataaaaaaaagttttactaatttaaaatttaaaaagtatttacatttttttcactgtttagtcgcggatatggaattcgatcctgccaaaatcaatacatcatctatagatcatgtaacaatattacaatacatagatgaaccaaatgatataagactaacagtatgcattatccgaaatattatatcaatatcacaaaaataaatacacatttggctaatcaatttcgggcttggaaaaaacgtatcgccggaagggactatatgactaacttatctagagatacaggaatacaacaatcaaaacttactgaaactatacgtaactgtcaaaaaaatagaaacatatatggtctatatatacactacaatttagttattaattggataaccgatgtgattatcaatcaatattaagagggttggtaaattggtacatagctaataatacctatactccaaatacacccaataatacaacaaccatttctgagttggatatcatcaaaatactggataaatacgaggacgtgtatagagtaagtaaagaaaaagaatgtggaatttgctatgaagttgtttactcaaaacgatagatactttggtttattggattcgtgtactcatatattttgcataacatgcatcaatatatggcatagaacacgaagagaaaccggtgcgtcggataattgtcctatatgccgtacccgttttagaaacataacaatgagcaagttctataagctagttaactaataaataaaaagtttaatttgttgacgacgtatgtcgttattttttctcgtataaaagattaatttgattctaatataatctttagtattggataaatatcaattcaaattaattccattagattatatcataaataaaaatagtagcacgcactacttcagccaaatattcttttttgaaacgccatctatcgtagtgaggacacaagtgaacctataattatcaaatttattagtatcggttacatgaaggactttacgtagagtgacgattccactatctgtggtacgaacggtttcatcttctttgatgccatcacccagatgttctataaacttggtatcctcgtccgatctcatatcctttgccaaccaatacatgtagctaaaattaggcataaatttcacacatcctgaacaatgaaattctccagaagatgttacaatgtctagatttggacatttggtttcaaccgcgttaacatatgagtgaacacacccatacatgaaagcgatgagaaataggattctcatcttgccaaaatatcactagaaaaaatttatttatcagttttaaaggtataaaaaatacttattgttgctcgaatattttgtatttgatggtatacggaagattagaaatgtaggtattatcatcaactgattctatggttttatgtattctatcatgtttcactattgcgttggaaataatatcatatgcttccacatatattttattttgttttaactcataatactcacgtaattctggattattggcatatctatgaataattttagctccatgatcagtaaatattaatgagaacatagtattaccacctaccattatttttttcatctcattcaattcttaattgcaaagatctatataatcattatagcgttgacttatggactctggaatcttagacgatgtacagtcatctataatcatggcatatttaatacattgttttatagcatagtcgttatctacgatgttagatatttctctcaatgaatcaatcacacaatctaatgtaggtttatgacataatagcattttcagcagttcaatgtttttagattcgttgatggcaatggctatacatgtatatccgttatttgatctaatgttgacatctgaaccggattctagcagtaaagatactagagattgtttattatatctaacagccttgtgaagaagtgtttctcctcgtttgtcaatcatgttaatgtctttaagataaggtaggcaaatgtttatagtactaagaattgggcaagcataagacatgtcacaaagacccttttttgtatgtataagtgtaaaaattataacatccatagttggatttacataggtgtccaatcgggatctctccatcatcgagataattgatggcatctcccttccttttttagtagatatttcatcgtgtaagaatcaatattaatatttctaaagtatccgtgtatagcctctttatttaccacagctccatattccactagagggatatcgccgaatgtcatatactcaattagtatatgttggaggacatccgagttcattgttttcaatatcaaagagatggtttccttatcatttctccatagtggtacaatactacacattattccgtgcggctttccattttccaaaaacaatttgaccaaatctaaatctacatctttattgtatctataatcactatttagataatcagccataattcctcgagtgcaacatgttagatcgtctatatatgaataagcagtgttatctattcctttcattaacaatttaacgatgtctatatctatatgagatgacttaatataatattgaagagctgtacaatagtttttatctataaaagacggcttgattccgtgattaattagacatttaacaacttccggacgcacatatgctctcgtatccgactttgaatacagatgagagatgatatacagatgcaatacggtaccgcaatttcgtagttgataatcatcatacgcgtatcagtactcgtcctcataaagaacactgcagccattttctatgaacaaatcaataattttagaaacaggatcattgtcattacataattttctataactgaacgatggttttcacatttaacactcaagtcaaatccatgttctaccaacacctttatcaagtcaacgtctacatttttggatttcatatagctgaatatattaaagttatttatgttgctaaatccagtggcttctagtagagccatcgctatatccttattaactttaacatgtctactatttgtgtattcttctaatggggtaagctgtctccaatttttgcgtaatggattagtgccactgtctagtagtagtttgacgacctcgacattattacaatgctcattaaaaaggtatgcgtgtaaagcattattcttgaattggttcctggtatcattaggatctctgtctttcaacatctgtttaagttcatcaagagccacctcctcattttccaaatagtcaaacattttgactgaatgagctactgtgaactctatacacccacacaactaatgtcattaaatatcatgtcaaaaacttgtacaattattaataaaaataatttagtgtttaaattttaccagttccagattttacacctccgttaatacctccattaaccccactggacgatcctcctccccacattccaccgccaccagatgtataagttttagatcctttattactaccatcatgtccatggataaagacactccacatgccgccactaccccctttagaagacatattaataagacttaaggacaagtttaacaataaaattaatcacgagtaccctactaccaacctacactattatatgattatagtttctatttttacagtaccttgactaaagtttctagtcacaagagcaatactaccaacctacactattatatgattatagtttctatttttataggaacgcgtacgagaaaatcaaatgtctaatttctaacggtagtgttgataaacgattgttatccgcggatacctcctctatcatgtcgtctattttcttactttgttctattaacttattagcattatatattatttgattataaaacttatattgcttattagcccaatctgtaaatatcggattattaacatatcgtttctttgtaggtttatttaacatgtacatcactgtaagcatgtccttaccatttattttaatttgacgcatatccgcaatttctttttcgcagtcggttataaattctatatatgatggatacatgctacatgtgtacttataatcgactaatatgaagtacttgatacatattttcagtaacgatttattattaccacctatgaataagtacctgtgatcgtctaggtaatcaactgttttcttaatacattcgatggttggtaatttactcagaataatttccaatatcttaatatataattctgctatttctgggatatatttatctgccagtataacacaaatagtaatacatgtaaacccatattttgttattatattaatgtctgcgccattatctattaaccattctactaggctgacactatgcgactcaatacaatgataaagtatactacatccatgtttatctattttgtttatatcatcaatatacggcttacaaagttttagtatcgataacacatccaactcacgcatagagaaggtagggaataatggcataatatttattaggttatcatcattgtcattatctacaactaagtttccattttttaaaatatactcgacaactttaggatctctattgccaaatttttgaaaatatttatttatatgcttaaatctatataatgtagctccttcatcaatcatacatttaataacattgatgtatactgtatgataagatacatattctaacaatagatcttgtatagaatctgtatatcttttaagaattgtggatattaggatattattacataaactattacacaattctaaaatataaaacgtatcacggtcgaataatagttgatcaactatataattatcgattttgtgatttttcttcctaaactgtttacgtaaatagttagatagaatattcattagttcatgaccactatagttactatcgaataacgcgtcaaatatttcccgtttaatatcgcatttgtcaagataataatagagtgtggtatgttcacgataagtataataacgcatctctttttcgtgtgaaattaaatagtttattacgtccaaagatgtagcataaccatcttgtgacctagtaataatataataatagagaactgttttacccattctatcatcataatcagtggtgtagtcgtaatcgtaatcgtctaattcatcatcccaattataatattcaccagcacgtctaatctgttctattttgatcttgtatccatactgtatgttgctacatgtaggtattcctttatccaataatagtttaaacacatctacattgggatttgatgttgtagcgtatttttctacaatattaataccatttttgatactatttatttctatacctttcgaaattagtaatttcaataagtctatattgatgttatcagaacatagatattcgaatatatcaaaatcattgatatttttatagtcgactgacgacaataacaaaatcacaacatcgtttttgatattattatttttcttggtaacgtatgcctttaatggagtttcaccatcatactcatataatggatttgcaccactttctatcaatgattgtgcactgctggcatcgatgttaaatgttttacaactatcatagagtatcttatcgttaaccatgattggttgttgatgctatcgcattttttggtttctttcatttcagttatgtatggatttagcacgtttgggaagcatgagctcatatgatttcagtactgtagtgtcagtactattagtttcaataagatcaatctctagatctatagaatcaaaacacgataggtcagaagataatgaatatctgtacgcttcttgttgtactgtaacttctggttttgttagatggttgcatcgtgctttaacgtcaatggtacaaattttatcctcgctttgtgtatcatattcgtccctactataaaattctatattcagattatcatgcgatgtgtatacgctaacggtatcaataaacggagcacaccatttagtcataaccgtaatccaaaaatttttaaagtatatcttaacgaaagaagttgtatcattgtctacggtgtatggtactagatcctcataagtgtatatatctagagtaatgtttaatttattaaatggttgataatatggatcgtcgtggcaatttcctaagatggaaatgagatatagacacgcaataaatctaatcgaagacatggttactccttaaaaaaatacgaataatcaccttggctatttagtaagtgtcatttaacactatactcatattaatccatggactcataatctctatacgggattaacggatgttctatatacggggatgagtagttctcttctttaactttatactttttactaatcatatttagactgatgtatgggtaatagtgtttgaagagctcgttctcatcatcagaataaatcaatatctctgtttttttgttatacagatgtattacagcctcatatattacgtaatagaacgtgtcatctaccttattaactttcaccgcatagttgtttgcaaatacggttaatcctttgacctcgttgatttccgaccaatctgggcgtataatgaatctaaactttaatttcttgtaatcattcgaaataatttttagtttgcatccgtagttatcccctttatgtaactgtaaatttctcaacgcgatatctccattaataatgatgtcgaattcgtgctgtatacccatactgaatggatgaacgaataccgacggcgttaatagtaatttactttttcatctttacatattgggtactagttttactatcataagtttataaattccacaagctactatggaataagccaaccatcttagtataccacacatgtcttaaagtttattaattaattacatgttgttttatatatatcgctacgaatttaaacagagaaatcagtttaggaaaaaaaaaattatctatctacatcatcacgtctctgtattctacgatagagtgctactttaagatgagacatatccgtgtcatcaaaaatatactccattaaaatgattattccggcagcgaacttgatattggatatatcacaacctttgttaatatctacgacaatagacagcagtcccatggttccataaacagtgagtttatctttctttgaagagatattttgtagagatcttataaaactgtcgaatgacatcgcatttatatctttagctaaatcgtatatgttaccatcgtaatatctaaccgcgtctatcttaaacgtttccatcgctttaaagacgtttccgatagatggtctcatttcatcagtcatactgagccaacaaatataatcgtgtataacatctttgatagaatcagactctaaagaaaacgaatcggctttattatacgcattcatgataaacttaatgaaaaatgtttttcgttgtttaagttggatgaatagtatgtcttaataattgttattatttcattaattaatatttagtaacgagtacactctataaaaacgagaatgacataactaatcataactagttatcaaagtgtctaggacgcgtaattttcatatggtatagatcctgtaagcattgtctgtattctggagctattttctctatcgcattagtgagttcagaatatgttataaatttaaatcgaataacgaacataactttagtaaagtcgtctatattaactcttttattttctagccatcgtaataccatgtttaagatagtatattctctagttactacgatctcatcgttgtctagaatatcacatactgaatctacatccaattttagaaattggtctgtgttacatatctcttctatattattgttgatgtattgtcgtagaaaactattacgtagaccattttctttataaaacgaatatatagtactccaattatctttaccgatatatttgcacacataatccattctctcaatcactacatctttaagattttcgttgttaagatatttggctaaactatataattctattagatcatcaacagaatcagtatatatttttctagatccaaagacgaactctttggcgtcctctataatattcccagaaaagatattttcgtgttttagtttatcgagatctgatctgttcatatacgccatgattgtacggtacgttatgataaccgcataaaataaaaatccattttcatttttaaccaatactattcataattgagattgatgtaatactttgttactttgaacgtaaagacagtacacggatccgtatctccaacaagcacgtagtaatcaaatttggtgttgttaaacttcgcaatattcatcaatttagatagaaacttatactcatcatctgttttaggaatccatgtattattaccactttccaacttatcattatcccaggctatgtttcgtccatcatcgttgcgcagagtgaataattcttttgtattcggtagttcaaatatatgatccatgcatagatcggcaaagctattgtagatgtgatttttcctaaatctaatataaaactcgtttactagcaaacactttcctgatttatcgaccaagacacatatggtttctaaatctatcaagtggtggggatccatagttatgacgcagtaacatatattattacattcttgactgtcgctaatatctaaatatttattgttatcgtattggattctgcatatagatggcttgtatgtcaaagatatagaacacataaccaatttatagtcgcgctttacattctcgaatctaaagttaagagatttagaaaacattatatcctcggatgatgttatcactgtttctggagtaggatatattaaagtctttacagatttcgtccgattcaaataaatcactaaataatatcccacattatcatctgttagagtagtatcattaaatctattatattttatgaaagatatatcactgctcacctctatatttcgtacatttttaaactgtttgtataatatctctctgatacaatcagatatatctattgtgtcggtagacgataccgttacatttgaattaatggtgttccattttacaacttttaacaagttgaccaattcatttctaatagtatcaaactctccatgattaaatattttaatagtatccattttatatcactacggacacaaagtagctgacataaaccattgtataatttttatgttttatgtttattagcgtacacattttggaagttccggcttccatgtatttcctggagagcaagtagatgatgaggaaccagatagtttatatccgtacttgcacttaaagtctacattgtcgttgtatgagtatgatcttttaaacccgctagacaagtatccgtttgatattgtaggatgtggacatttaacaatctgacacgtgggtggatcggaccattctcctcctgaacacaggacactagagttaccaatcaacgaatatccactattgcaactataagttacaacgctcccatcggtataaaaatcctcgtatccgttatgtcttccgttggatatagatggaggggattggcatttaacagattcacaaataggtgcctcgggattccataccatagatccagtagatcctaattcacaatacgatttagattcaccgatcaactgatatccgctattacaagagtacgttatactagagccaaagtctactccaccaatatcaagttggccattatcgatatctcgaggcgatgggcatctccgtttaatacattgattaaagagtgtccatccagtacctgtacatttagcatatataggtcccattttttgctttctgtatccaggtagacatagatattctatagtgtctcctatgttgtaattagcattagcatcagtctccacactattcttaaatttcatattaatgggtcgtgacggaatagtacagcatgatagaacgcatcctattcccaacaatgtcaggaacgtcacgctctccaccttcatatttatttatccgtaaaaatgttatcctggacatcgtacaaataataaaaagcccatatatgttcgctattgtagaaattgtttttcacagttgctcaaaaacgatggcagtgacttatgagttacgttacactttggagtctcatctttagtaaacatatcataatattcgatattacgagttgacatatcgaacaaattccaagtatttgattttggataatattcgtattttgcatctgctataattaagatataatcaccgcaagaacacacgaacatctttcctacatggttaaagtacatgtacaattctatccatttgtcttccttaactatatatttgtatagataattacgagtctcgtgagtaattccagtaattacatagatgtcgccgtcgtactctacagcataaactatactatgatgtctaggcatgggagacttttttatccaacgatttttagtgaaacattccacatcgtttaatactacatatttctcatacgtggtataaactccacccattacatatatatcatcgtttacgaataccgacgcgcctgaatatctaggagtaattaagtttggaagtcttatccatttcgaagtgccgtgtttcaaatattctgccacacccgttgaaatagaaaattctaatcctcctattacatataactttccatcgttaacacaagtactaacttctgattttaacgacgacatattagtaaccgttttccattttttcgttttaagatctacccgcgatacggaataaacatgtctattgttaatcatgccgccaataatgtatagacaattatgtaaaacatttgcattatagaattgtctatctgtattaccgactatcgtccaatattctgttctaggagagtaatgggttattgtggatatataatcagagtttttaatgactactatattatgttttataccatttcgtgtcactggctttgtagatttggatatagttaatcccaacaatgatatagcattgcgcatagtattagtcataaacttgggatgtaaaatgttgatgatatctacatcgtttggatttttatgtatccactttaataatatcatagctgtaacatcctcatgatttacgttaacgtcttcgtgggataagatagttgtcagttcatcctttgataattttccaaattctggatcggatgtcaccgcagtaatattgttgattatttctgacatcgacgcattatatagttttttaattccatatcttttagaaaagttaaacatccttatacaatttgtgaaattaatattatgaatcatagtttttacacatagatctactacaggcggaacatcaattattatggcagcaactagtatcatttctacattgtttatggtgatgtttatcttcttccagcgcatatagtctaatagcgattcaaacgcgtgatagtttataccattcaatataatcgcttcatcctttagatggtgatcctgaatgcgtttaaaaaaattatacggagacgccgtaataatttccttattcacttgtataatttccccattgatagaaaatattacgctttccattcttaaagtactataagtaattatagtataatgtaaacgtttatatattcaatatttttataaaaatcattttgacattaattcctttttaaatttccgtctatcatctatagaaacgtattctatgaatttataaaatgcttttacgtgtcctatcgtaggcgatagaaccgctaaaaagcctatcgaatttctacaaaagaatctgttatatggtatagggagagtataaaacattaaatgtccgtacttattaaagtattcagtagccaatcctaactctttcgaatacttattaatggctcttgttctgtacgaatctatttttttgaacaacggacctagtggtatatcttgttctatgtatctaaaataatgtctgactagatccgttagtttaatatccgcagtcatcttgtctagaatggcaaatctaactgcgggtttaggctttagtttagtttctatatctacatctatgtctttatctaacaccaaaaatataatagctaatattttattacaatcatccggatattcttctacgatctcactaactaatgtttctttggttatactagtatagtcactatcggacaaataaagaaaatcagatgatcgatgaataatacatttaaattcatcatctgtaagatttttgagatgtctcattagaatattattagggttagtactcattatcattcggcagctattacttattttattatttttcaccatatagatcaatcattagatcatcaaaatatgtttcaatcatcctaaagagtatggtgaatgactcttcccatctaatttctgaacgttcaccaatgtctctagccactttggcactaatagcgatcattcgcttagcgtcttctatattattaactggttgatttaatctatctagcaatggaccgtcggacagcgtcattctcatgttcttaatcaatgtacatacatcgccgtcatctaccaattcatccaacaacataagctttttaaaatcatcattataataggtttgatcgttgtcatttctccaaagaatatatctaataagtagagtcctcatgcttagttaacaactattttttatgttaaatcaattagtacaccgctatgtttaatacttattcatattttagtttttaggattgagaatcaatacaaaaaattaatgcatcattaattttagaaatacttagtttccacgtagtcaatgaaacatttgaactcatcgtacaggacgttctcgtacaggacgtaactataaaccggtttatatttgttcaagatagatacaaatccgataactttttttacgaattctacgggatccactttaaaagtgtcataccgggttctttttatttttttaaacagatcaatggtgtgatgttgattaggtcttttacgaatttgatatagaatagcgtttacatatcctccataatggtcaatcgccatttgttcgtatgtcataaattctttaattatatgacactgtgtattatttagttcatccttgttcattgttaggaatctatccaaaatggcaattatactagaactataggtgcgttgtatacacatattgatgtgtctgtttatacaatcaatgctactaccttcgggtaaaattgtagcatcatataccatttctagtactttaggttcattattatccattgcagaggacgtcatgatcgaatcataaaaaaatatattatttttatgttattttgttaaaaataatcatcgaatacttcgtaagatactccttcatgaacataatcagttacaaaacgtttatatgaagtaaagtatctacgatttttacaaaagtccggatgcataagtacaaagtacgcgataaacggaataataatagatttatctagtctatctttttctatagctttcatagttagatacatggtctcagaagtaggattatgtaacatcagcttcgataaaatgactgggttatttagtcttacacattcgctcatacatgtatgaccgttaactacagagtctacactaaaatgattgaacaatagatagtctaccattgtttcgtattcagatagtacagcgtagtacatggcatcttcacaaattatatcattgtctaatagatatttgacgcatcttatggatcccacttcaacagccatcttaaaatcggtagaatcatattgctttcctttatcattaataatttctagaacatcatctctatcataaaagatacaaatattaactgtttgatccgtaataacattgctagtcgatagcaatttgttaataagatgcgctgggctcaatgtcttaataagaagtgtaagaggactatctccgaatttgttttgtttattaacatccgttgatggaagtaaaagatctataatgtctacattcttgactgttttagagcatacaatatggagaggtgtatttccatcatgatctggttttgagggactaattcctagtttcatcatccatgagattgtagaagcttttggattgtctgacataagatgtctatgaatatgatttttgccaaatttatccactatcctggcttcgaatccgatggacattatttttttaaacactctttctgaaggatctgtacacgccaacaacggaccacatccttcttcatcaaccgagttgttaatcttggctccatactgtaccaataaatttattctctctatgacttcatcatctgttcccgagagataatatagaggcgttttatgctgtttatcacacgcgtttggatctgcgccgtgcgtcagcagcatcgcgactattctattattattaattttagaagctatatgcaatggataatttccatcatcatccgtctcatttggagagtatcctctatgaagaagttcttcgacaaatcgttcatctagtcctttaattccacaatacgcatgtagaatgtgataattatttccagaaggttcgatagcttgtagcatattcctaaatacatctaaatttttactattatatttggcataaagagatagataatactcggccgacataatgttgtccattgtagtataaaaattaatatttctatttctgtatatttgcaacaatttactctctataacaaatatcataacttagttcttttatgtcaagaaggcactggtttagttcatctataaatgtcacgccataactaccacgcatgccatactcagaattatgataaagatatttatccttggggtgtaggtaatggggattaatctttgttggatcagtctctaagttaacacatgtcacacatgatccatttatagttatatcacacgatgatgatttatgaattgattccggaagatcgctatcgtattttgtggttccacaattcatttccatacatgttattgtcacactaatattatgatgaactttatctagccgctgagtggtaaacaacagaacagatagtttattatctttaccaacaccctcagccgctgccacaaatctctgatccgtatccatgatggtcatgtttatttctagtccgtatccagtcaacactatgttagcatttctgtcgatatagctttcactcatatgacactcaccaataatagtagaattaatgtcgtaatttacaccaatagtgagttcggcggcaaagtaccaataccggtaatcttgtcgaggaggacatatagtattcttgtattctaccgaatacccgagagatgcgatacaaaagagcaagactaatttgtaaaccatcttactcaaaatatgtaacaatagtacgatgcaatgagtaagacaataggaaatctatcttatatacacataattattctatcaattttaccaattagttagtgtaatgttaacaaaaatgtgggagaatctaattagtttttctttacacaattgacgtacatgagtctgagttccttgtttttgctaattatttcatccaatttattattcttgacgatatcgagatcttttgtataggagtcaaacttgtattcaacatgcttttctataatcattttagctatttcggcatcatccaatagtacattttccagattagcagaatagatattaatgtcgtatttgaacagagcctgtaacatctcaatgtctttattatctatagccaatttaatgtccggaatgaagagaagggaattattggtgtttgtcgacgtcatatagtcgagcaagagaatcatcatatccacgtgtccattttttatagtgatgtgaatacaactaaggagaatagccagatcaaaagtagatggtatctctgaaagaaagtaggaaacaatacttacatcattaagcatgacggcatgataaaatgaagttttccatccagttttcccatagaacatcagtctccaatttttcttaacaaacagttttaccgtttgcatgttaccactatcaaccgcataatacaatgcggtgtttcccttgtcatcaaattgtgaatcatccagtccactgaatagcaaaatctttactattttggtatcttccaatgtggctgcctgatgtaatggaaattcattctctagaagatttttcaatgctccagcgttcaacaacgtacatactagacgcacgttattatcagctattgcataatacaaggcactatgtccatggacatccgccttaaatgtatctttactagagagaaagcttttcagctgcttagacttccaagtattaattcgtgacagatccatgtctgaaacgagacgctaattagtgtatattttttcattttttataattttgtcatattgcaccagaattaataatatctttaatagatctgattagtagatacatggctatcgcaaaacaacatatacacatttaataaaaataatatttattaagaaaattcagatttcacgtacccatcaatataaataaaataatgattccttacaccgtacccatattaaggagattccaccttacccataaacaatataaatccagtaatatcatgtctgatgatgaacacaaatggtgtattaaattccagtttttcaggagatgatctcgccgtagctaccataatagtagatgcctctgctacagttccttgttcgtcgacatctatctttgcattctgaaacattttataaatatataatgggtccctagtcatatgtttaaacgacgcattatctggattaaacatactaggagccatcatttcggctatcgacttaatatccctcttattttcgatagaaaatttagggagtttaagattgtacactttattccctaattgagacgaccaatagtctaattttgcagccgtgatagaatctgtgaaatgggtcatattatcacctattgccaggtacatactaatattagcatccttatacggaaggcgtaccatgtcatattctttgtcatcgattgtgattgtatttccttgcaatttagtaactacgttcatcatgggaaccgttttcgtaccgtacttattagtaaaactagcattgcgtgttttagtgatatcaaacggatattgccatatacctttaaaatatatagtattaatgattgcccatagagtattattgtcgagcatattagaatctactacattagacataccggatctacgttctactatagaattaattttattaaccgcatctcgtctaaagtttaatctatataggccgaatctatgatattgttgataatacgacggtttaatgcacacagtattatctacgaaactttgataagttagatcagtgtacgtatatttagatgttttcagcttagctaatcctgatattaattctgtaaatgctggacccagatctctttttctcaaatccatagtcttcaataattctattctagtattacctgatgcaggcaatagcgacataaacatagaaaacgaataaccaaacggtgagaagacaatattatcatcttgaatatttttatacgctactataccggcattggtaaatccttgtagacgataggcggacgctgaacacgctaacgatagtatcaataacgcaatcatgattttatggtattaataattaaccttatttttatgttcggtataaaaaaattattgatgtctacacatccttttgtaattgacatctatatatccttttgtataatcaactctaatcactttaacttttacagttttccctaccagtttatccctatattcaacatatctatccatatgcatcttaacactctctgccaagatagcttcagagtgaggatagtcaaaaagataaatatatagagcataatcattctcgtatactctgccctttattacatcacccgcattgggcaacgaataacaaaatgcaagcatcttgttaacgggctcgtaaattgggataaaaattatgtttttattgtcttatatctattttattcaagagaatattcaggaatttctttttccggttgtatctcgtcgcagtatatatcatttgtacattgtttcatattttttaatagtttacaccttttagtaggactagtatcgtacaattcatagctgtattttgaattccaatcacgcataaaaatatcttccaattgttgacgaagacctaatccatcatccggtgtaatattaatagatgctccacatgtatccgtaaagtaatttcctgtccaatttgaggtacctatataggccgttttatcggttaccatatatttggcatggtttaccctagaatacggaatgggaggatcagcatctggtacaataaatagctttacttctatatttatgtttttagattttagcatagcgatagatcttaaaaagtttctcatgataaacgaagatcgttgccagcaactaatcaatagcttaacggatacttgtctgtctatagcggatcttcttaattcatcttctatataaggccaaaacaaaattttacccgccttcgaataaataatagggataaagttcataacagatacataaacgaatttactcgcatttctaatacatgacaataaagcggttaaatcattggttctttccatagtacatagttgttgcggtgcagaagcaataaatacagagtgtggaacgccgcttacgttaatactaagaggatgatctgtattataatacgacggataaaagtttttccaattatatggtagattgttaactccaagataccagtatacctcaaaaatttgagtgagatccgctgccaagttcctattattgaagatcgcaatacccaattccttgacctgagttagtgatctccaatccatgttagcgcttcctaaataaatatgtgtattatcagatatccaaaattttgtatgaagaactcctcctaggatatttgtaatatctatgtatcgtacttcaactccggccatttgtagtctttcaacatcctttaatggtttgttagatttattaacggctactctaactcgtactcctcttttgggtaattgtacaatctcgtttaatattatcgtgccgaaattcgtacccacttcatccgataaactccaataaaaagatgatatatctagtgtttttgtggtattggatagaatttccctccacatgttaaatgtagacaaatatactttatcaaattgcatacctataggaatagtttctgtaatcactgcgattgtattatccggattcattttatttgttaaaagaataatcctatatcacttcactctattaaaaatccaagtttctatttctttcatgactgattttttaacttcatccgtttccttatgaagatgatgtttggcaccttcataaatttttatttctctattacaatttgcatgttgcatgaaataatatgcacctaaaacatcgctaatcttattgtttgttccctggagtatgagagtcgggggggtgttaatcttggaaattatttttctaaccttgttggtagccttcaagacctgactagcaaatccagccttaattttttcatgattgactaatgggtcgtattggtatttataaactttatccatatctctagatactgattctggacatagctttccgactggcgcatttggtgtgatggttcccataagtttggcagctagcagattcagtcttgaaacagcatctgcattaactagaggagacattagaatcattgctgtaaacaagtttggattatcgtaagaggctagctcccatggaatgacccaataagtagatttaatagttaccacgtgctgtaccaaagtcatcaatcatcattttttcaccattacttcttccatgtccaatatgatcatgtgagaatactaaaattcctaacgatgatatgttttcagctagttcgtcataacgtccagaatgtttaccagctccatgacttatgaatactaatgccttaggatatgtaataggtttccaatatttacaatatatgtaatcattgtccagattgaacatacagtttgcactcatgattcacgttatataactatcaatattaacagttcgtttgatgatcatattatttttatgttttattgataattgtaaaaacatacaattaaatcaatatagaggaaggagacggctactgtcttttgtaagatagtcatggcgactaaattagattatgaggatgctgttttttactttgtggatgatgataaaatatgtagtcgcgactccatcatcgatctaatagatgaatatattacgtggagaaatcatgttatagtgtttaacaaagatattaccagttgtggaagactgtacaaggaattgatgaagttcgatgatgtcgctatacggtactatggtattgataaaattaatgagattgtcgaagctatgagcgaaggagaccactacatcaattttacaaaagtccatgatcaggaaagtttattcgctaccataggaatatgtgctaaaatcactgaacattggggatacaaaaagatttcagaatctagattccaatcattgggaaacattacagatttgatgaccgacgataatataaacatcttgatactttttctagaaaaaaaattgaattgatgatataggggtcttcataacgcataattattacgttagcattctatatccgtgttaaaaaaaattatcctatcatgtatttgagagttttatatgtagcaaacatgatagctgtgatgccaataagctttagatattcacgcgtgctagtgttagggatggtattatctggtggtgaaatgtccgttatataatctacaaaacaatcatcgcatatagtatgcgatagtagagtaaacatttttatagtttttactggattcatacatcgtctacccaattcggttataaatgaaattgtcgccaatcttacacccaaccccttgttatccattagcatagtattaacttcgttatttatgtcataaactgtaaatgattttgtagatgccatatcatacatgatattcatgtccctattataatcattactaactttatcacaatatatgttgataatatctatatatgatctagtctttgtgggcaactgtctatacaagtcgtctaaacgttgtttactcatatagtatcgaacagccatcattacatggtcccgttccgttgatagataatcgagtatgttagtggacttgtcaaatctatataccatattttctggaagtggatatacatagtcgtgatcaacattattgctagcctcatcttctatatcctgtactataccattatctatatcatctacataatctatgatattattacacataaacatcgacaacatactattgtttattatctaagtcctgttgatccaaacccttgatctcctctatttgtactatctagagattgtacttcttccagttctggataatatatacgttgatagattagctgagctattctatctccagtatttacattaaacgtacattttccattattaataagaatgactcctatgtttcccctataatcttcgtctattacaccacctcctatatcaatgccttttagtgacagaccagacctaggagctattctaccatagcagaacttaggcatggacatactaatatctgtcttaattaactgtctttctcctggagggatagtataatcgtaagcgctatacaaatcatatccggcagcacccggcgattgcctagtaggagatttagctctgttagtttccttaacaaatctaactggtgagttaatattcatgttgaacataaaactaatattttatttcaaaattatttaccatcccatatattccatgaataagtgtgatgattgtacacttctatagtatctatatacgatccacgataaaatcctcctatcaatagcagtttattatccactatgatcaattctggattatccctcggataaataggatcatctatcagagtccatgtattgctggattcacaataaaattccgcatttctaccaaccaagaataaccttctaccgaacactaacgcgcatgatttataatgaggataataagtggatggtccaaactgccactgatcatgattgggtagcaaatattctgtagttgtatcagtttcagaatgtcctcccattacgtatataacattgtttatggatgccactgctggattacatctaggtttcagaagactcggcatattaacccaagcagcatccccgtggaaccaacgctcaacagatgtgggatttggtagacctcctactacgtataatttattgttagcgggtatcccgctagcatacagtctggggctattcatcggaggaattggaatccaattgtttgatatataatttaccgctatagcattgttatgtatttcattgttcatccatccaccgatgagatatactacttctccaacatgagtacttgtacacatatggaatatatctataatttgatccatgttcataggatactctatgaatggatacttgtatgatttgcgtggttgtttatcacaatgaaatattttggtacagtctagtatccattttacattatttatacctctgggagaaagataatttgacctgattacatttttgataaggagtagcagatttcctaatttatttcttcgctttatataccacttaatgacaaaatcaactacataatcctcatctggaacatttagttcatcgctttctagaataagtttcatagatagataatcaaaattgtctatgatgtcatcttccagttccaaaaagtgtttggcaataaagtttttagtatgacataagagattggatagtccgtattctatacccatcatgtaacactcgacacaatattcctttctaaaatctcgtaagataaagtttatacaagtgtagatgataaattctacagaggttaatatagaagcacgtaataaattgacgacgttatgactatctatatatacctttccagtatacgagtaaataactatagaagttaaactgtgaatgtcaaggtctagacaaaccctcgtaactggatctttatttttcgtgtatttttgacgtaaatgtgtgcgaaagtaaggagataactttttcaatatcgtagaattgactattatattgcctcctatggcatcaataattgttttgaatttcttagtcatagacaatgctaatatattcttacagtacacagtattgacaaatatcggcatttatgtttctttaaaagtcaacatctagagaaaaatgattatctttttgagacataactcccattttttggtattcacccacacgtttttcgaaaaaattagtttttccttccaatgatatattttccatgaaatcaaacggattggtaacattataaatttttttaaatcccaattcagaaatcaatctatccgcgacgaattctatatatgttttcatcatttcacaattcattcctataagtttaactggaagagccgcagtaagaaattcttgttcaatggatactgcatctgttataatagatctaacggtttcttcactcggtggatgcaataaatgtttaaacatcaaacatgcgaaatcgcagtgcagaccctcgtctctactaattagttcgttggaaaacgtgagtccgggcattaggccacgctttttaagccaaaatatggaagcgaatgatccggaaaagaagattccttctactgcagcaaaggcaataagtctctctccataaccggcgctgtcatgtatccacttttgagcccaatcggccttcttttttacacaaggcatcgtttctatggcattaaagagatagtttttttcattactatctttaacataagtatcgatcaaaagactatacatttccgaatgaatgttttcaatggccatctgaaatccgtagaaacatctagcctcggtaatctgtacttctgtacaaaatcgttccgccaaattttcattcactattccgtcactggctgcaaaaaacgccaatacatgttttataaaatatttttcgtctggtgttagtttattccaatcattgatatctttagatatatctacttcttccactgtccaaaatgatgcctctgcctttttatacatgttccagatgtcatgatattggattgggaaaataacaaatctatttggatttggtgcaaggatgggttccataactaaattaacaataacaataaattttttttcagttatctatatgcctgtacttggattttttgtacatcgatatcgccgcaatcactacaataattacaagtattattgatagcattgttattagtactatcataattaaattatctacattcatgggtgctgaataatcgttattatcatcattatcattttgtaattgtgacatcatactagataaatcgtttgcgagattgttgtgggaagcgggcatggaggatgcattatcattattatttaacgccttccatttggattcacaaatgttacgcacattcaacattttatggaaactataattttgtgaaaacaaataacaagaaaactcgtcatcgttcaaatttttaacgatagtaaaccgattaaacgtcgagctaatttctaacgctagcgactctgttggatatgggtttccagatatatatcttttcagttcccctacgtatctataatcatctgtaggaaatggaagatatttccatttatctactgttcctaatatcatatgtggtggtgtagtagaaccattaagcgcgaaagatgttatttcgcatcgtattttaacttcgcaataatttctggttagataacgcactctaccagtcaagtcaatgatattagcctttacagatatattcatagtagtcgtaacgatgactccatcttttagatgcgatactcctttgtatgtaccagaatcttcgtacctcaaactcgatatatttaaacaagttaatgagatattaacgcgttttatgaatgatgatatataaccagaagttttatcctcggtggctagcgctataaccttatcattataataccaactagtgtgattaatatgtgacacgtcagtgtgggtacaaatatgtacattatcgtctacgtcgtattcgatacatccgcatacagccaacaaatataaaatgacaaatactctaacgccgttcgtacccatcttgatgcggtttaataaatgttttgatttcaatttattgtaaaaaaagattcggttttatactgttcgatattctcattgcttatattttcatctatcatctccacacagtcaaatccgtggttagcatgcacctcatcaaccggtaaaagactatcggactcttctatcattataactctagaatatttaatttggtcattattaatcaagtcaattatcttatttttaacaaacgtgagtattttactcattttttataaaaacttttagaaatatacagactctatcgtgtgtctatatcttctttttatatccaatgtatttatgtctgatttttcttcatttatcatatataatggtccaaattctacacgtgcttcggattcatccagatcattaaggttcttataattgtaacatccttctcttccctcttctacatcttccttcttattcttattcttagcgtcacagaatctaccacagcaggatcccatgacgagcgtcatattaaactaatccattttcaattataatatatgattagtaatgaccattaaaataaaaaatattcttcataaccggcaagaaagtgaaaagttcacattgaaactatgtcagtagtatacatcatgaaatgatgatatatatatactctattttggtggaggattatatgatataattcgtggataatcatttttaagacacatttctttattcgtaaatcttttcacgttaaatgagtgtccatattttgcaatttcttcatatgatggcggtgtacgtggacgaggctgctcctgttcttgttgtggtcgccgactgtcgtgtctgcgtttagatccctccattatcgcgattgcgtagatggagtactattttataccttgtaattaaatttttttattaattaaacgtataaaaacgttccgtatctgtatttaagagccagatttcgtctaatagaacaaatagctacagtaaaaataactagaataattgctacacccactagaaaccacggatcgtaatacggcaatcggttttcgataataggtggaacgtatattttatttaaggacttaacaattgtctgtaaaccacaatttgcttccgcggatcctgtattaactatctgtaaaagcatatgttgaccgggcggagccgaacattctccgatatctaatttctgtatatctataatattattaacctccgcatacgcattacagttcttttctagcttggataccgcactaggtacatcgtctagatctattcctatttcctcagcgatagctcttctatccttttccggaagcaatgaaatcacttcaataaatgattcaaccatgagtgtgaaactaagtcgagaattactcatgcatttgttagttattcggagcgcgcaatttttaaactgtcctataacctctcctatatgaatagcacaagtgacattagtagggatagaatgttgagctaatttttgtaaataactatctataaaaagattatacaaagttttaaactctttagtttccgccatttatccagtctgagaaaatgtctctcataataaatttttccaagaaactaattgggtgaagaatggaaacctttaatctatatttatcacagtctgttttggtacacatgatgaattcttccaatgccgtactaaattcgatatctttttcgatttctggatatgtttttaataaagtatgaacaaagaaatggaaatcgtaataccagttatgtttaactttgaaattgttttttattttcttgttaatgattccagccacttgggaaaagtcaaagtcgtttaatgccgatttaatacgttcattaaaaacaaactttttatcctttagatgaattattattggttcattggaatcaaaaagtaagatattatcgggtttaagatctgcgtgtaaaaagttgtcgcaacagggtagttcgtagattttaatgtataacagagccatctgtaaaaagataaactttatgtattgtaccaaagatttaaatcctaatttgatagctaactcggtatctactttatctgccgaatacagtgctaggggaaaaattataatgtttcctctttcatattcgtagttagttctcttttcatgttcgaaaaagtgaaacatgcggttaaaatagtttataacattaatattactgttaataactgccggataaaagtgggatagtaatttcacgaatttgatactgtcctttctctcgttaaacgcctttaaaaaaactttagaagaatatctcaatgagagttcctgaccatccatagtttgtatcaataatagcaacatatgaagaacacgtttatacagagtatgtaaaaatgttaatttatagtttaatcccatggcccacgcacacacgattaattttttttcatctccctttagattgttgtatagaaatttgggtactgtgaactccgccgtagtttccatgggactatataattttgtggcctcgaatacaaattttactacatagttatctatcttaaagactataccatatcctcctgtagatatgtgataaaaatcgtcgtttataggataaaatcgtttatccttttgttggaaaaaggatgaattaatgtaatcattctcttctatctttagtagtgtttccttattaaaattcttaaaataatttaacaatctaactgacggagcccaattttggtgtaaatctaattgggacattatattgttaaaatacaaacagtctcctaatataacagtatctgataatctatggggagacatccattgatattcaggggatgaatcattggcaacacccatttattgtacaaaaagccccaatttacaaacgaaagtccaggtttgatagagacaaacaattaactattttgtctctgtttttaacacctccacagtttttaatttctttagtaatgaaattattcacaatatcagtatcttctttatctaccagagattttactaacttgataaccttggctgtctcattcaatagggtagtaatatttgtatgtgtgatattgatatctttttgaattgtttcttttagaagtgattctttgatggtgccagcatacgaattacaataatgcagaaactcggttaacatgcaggaattatagtaagccaattccaattgttgcctgtgttgtattagagtgtcaatatgagcaatggtgtccttgcgtttctctgatagaatgcgagcagcgattttggcgttatcatttgacgatatttctggaatgacgaatcctgtttctactaactttttggtaggacaaagtgaaacaatcaagaagatagcttctcctcctatttgtggaagaaattgaactcctctagatgatctactgacgatagtatctccttgacagatattggaccgaattacagaagtacctggaatgtaaagccctgaaaccccctcattttttaagcagattgttgccgtaaatcctgcactatgcccaagatagagagctcctttggtgaatccatctctatgtttcagtttaaccaagaaacagtcagctggtctaaaatttccatctctatctaatacagcatctaacttgatgtcaggaactatgaccggtttaatgttatatgtaacattgagtaaatccttaagttcataatcatcactgtcatcagttatgtacgatccaaacaatgtttctaccggcatagtggatacgaagatgctatccatcagaatgtttccctgattagtattttctatatagctattcttctttaaacgattttccaaatcagtaactatgttcatttttttaggagtaggacgcctagccagtatggaagaggattttctagatcctctcttcaacatctttgatctcgatggaatgcaaaaccccatagtgaaacaaccaacgataaaaataatattgtttttcactttttataattttaccatctgactcatggattcattaatatctttataagagctactaacgtataattctttataactgaactgagatatatacaccggatctatggtttccataattgagtaaatgaatgctcggcaataactaatggcaaatgtatagaacaacgaaattatactagagttgttaaagttaatattttctatgagctgttccaataaattatttgttgtgactgcgttcaagtcataaatcatcttgatactatccagtaaaccgtttttaagttctggaatattatcatcccattgtaaagcccctaattcgactatcgaatatcctgctctgatagcagtttcaatatcgacggacgtcaatactgtaataaaggtggtagtattgtcatcatcgtgataaactacgggaatatggtcgttagtaggtacggtaactttacacaacgcgatatataactttccttttgtaccatttttaacgtagttgggacgtcctgcagggtattgttttgaagaaatgatatcgagaacagatttgatacgatatttgttggattcctgattattcactataatataatctagacagatagatgattcgataaatagagaaggtatatcgttggtaggataatacatccccattccagtattctcggatactctattgatgacactagttaagaacatgtcttctattctagaaaacgaaaacatcctacatggactcattaaaacttctaacgctcctgattgtgtctcgaatgcctcgtacaaggatttcaaggatgccatagattctttgaccaacgatttagaattgcgtttagcatctgatttttttattaaatcgaatggtcggctctctggtttgctaccccaatgataacaatagtcttgtaaagataaaccgcaagaaaatttatacgcatccatccaaataaccctagcaccatcggatgatattaatgtattattatagattttccatccacagttattgggccagtatactgttagcaacggtatatcgaatagattactcatgtaacctactagaatgatagttcgtgtactagtcataatatctttaatccaatctaagaaatttaaaattagattttttacactgttaaagttaacaaaggtattacccggatacgtggatatcatatatggcattggtccattatcagtaatagctccataaactgatacggcgatggtttttatatgtgtttgatctaacgaggaagaaattcgcgcccacaattcatctctagatatgtatttaatatcaaacggtaacacatcaatttcgggacgcgtatatgtttctaaatttttaatccaaatataatgatgacctatatgccctattatcatactgtcaactatagtacacctagagaacttacgatacatctgtttcctgtaatcgttaaattttacaaatctataacatgctaaaccttttgacgacagccattcattaatttctgatatggaatctgtattctcgataccgtatcgttctaaagccagtgctatatctccctgttcgtgggaacgctttcgtataatatcgatcaacggataatctgaagtttttggagaataatatgactcatgatctatttcgtccataaacaatctagacataggaattggaggcgatgatcttaattttgtgcaatgagtcgtcaatcctataacttctaatcttgtaatattcatcatcgacataatactatctatgttatcatcgtatattagtataccatgaccttcttcatttcgtgccaaaatgatatacagtcttaaatagttacgcaatatctcaatagtttcataattgttagctgttttcatcaaggtttgtatcctgtttaacatgatggcgttctataacgtctctattttctatttttaattttttaaatttttaacgatttactgtggctagatacccaatctctctcaaatatttttttagcctcgcttacaagctgtttatctatactattaaaactgacgaatccgtgattttggtaatgggttccgtcgaaatttgccgaagtgatatgaacatattcgtcgtcgactatcaacaattttgtattattctgaatagtgaaaaccttcacagatagatcattttgaacacacaacgcatctagacttttggcggttgccatagaatatacgtcgttcttatcccaattaccaactagaagtctgatcttaactcctctattaatggctgcttctataatggagttgtaaatgtcgggccaatagtagctattaccgtcgacacgtgtagtgggaactatggccaaatgttcaatatctatactagtcttagctgacctgagtttatcaataactacatcggtatctagatctctagaatatcccaataggtgttccggagaatcagtaaagaacactccacctataggattcttaatatgatacgcagtgctaactggcaaacaacaagccgcagagcataaattcaaccatgaattttttgcgctattaaaggctttaaaagtatcaaatcttctacgaagatctgtggccagcgggggataatcagaatatacacctaacgttttaatcgtatgtatagatcctccagtaaatgacgcgtttcctacataacatctttcatcatctgacacccaaaaacaaccgagtagtagtcccacattattttttttatctatattaacggttataaaatttatatccgggcagtgactttgtagctctcccagatttcttttccctcgttcatctagcaaaactattattttaatccctttttcagatgcctcttttagtttatcaaaaataagcgctcccctagtcgtactcagaggattacaacaaaaagatgctatgtatatatatttcttagctagagtgataatttcgttaaaacattcaaatgttgttaaatgatcggatctaaaatccatattttctggtagtgtttctaccagcctacattttgctcccgcaggtaccgatgcaaatggccacatttagttaacataaaaacttatacatcctgttctatcaacgattctagaatatcatcggctatatcgctaaaattttcatcaaagtcgacatcacaacctaactcagtcaatatattaagaagttccatgatgtcatcttcgtctatttctatatccgtatccattgtagattgttgaccgattatcgagtttaaatcattactaatactcaatccttcagaatacaatctgtgtttcattgtaaatttataggcggtgtatttaagttggtagattttcaattatgtattaatatagcaacagtagttcttgctcctccttgattctagcatcctcttcattattttcttctacgtacataaacatgtccaatacgttagacaacacaccgacgatggcggccgctacagacacgaatatgactaaaccgatgaccatttaaaaacccctctctagctttcacttaaactgtatcgatcattcttttagcacatgtataatataaaaacattattctatttcgaatttaggcttccaaaaatttttcatccgtaaaccgataataatatatatagacttgttaatagtcggaataaatagattaatgcttaaactatcatcatctccacgattagagatacaatatttacattctttttgctgtttcgaaactttatcaatacacgttaatacaaacccaggaaggagatattgaaactgaggctgttgaaaatgaaacggtgaatacaataattcagataatgtaaaatcatgattccgtattctgatgatattagaactgctaatggatgtcgatggtatgtatctaggagtatctattttaacaaagcatcgatttgctaatatacaattatccttttgattaattgttattttattcatattcttaaaaggtttcatatttatcaattcttctacattaaaaatttccatttttaatttatgtagccccgcaatactcctcattacgtttcattttttgtctataatatccattttgttcatctcggtacatagattatccaattgagaagcgcatttagtagttttgtacattttaagtttattgacgaatcgtcgaaaactagttatagttaacattttattatttgataccctgatattaatacccctgccgttactattatttataactgatgtaatccacgtaacattggaattaactatcgatagtaatgcatcgacgcttccaaaattgtctattataaactcaccgataatttttttattgcatgttttcatattcattaggattatcaaatctttaatcttattacgattgtatgcgttgatattacaagacgtcattctaaaagacggaggatctccatcaaatgccagacaatcacgtacaaagtacatggaaataggttttgttctattgcgcatcatagatttatatagaacacccgtagaaatactaatttgttttactctataaaatactaatgcatctatttcatcgttttgtataacgtctttccaagtgtcaaattccaaatttttttcattgatagtaccaaattcttctatctctttaactacttgcatagataggtaattacagtgatgcctacatgccgttttttgaaactgaatagatgcgtctagaagcgatgctacgctagtcacaatcaccactttcatatttagaatatatatatgtaaaaatatagtagaatttcattttgtttttttctatgctataaatgaattctcattttgcatctgctcatactccgttttatattaataccaaagaaggaagatatctggttctaaaagccgttaaagtatgcgatgttagaactgtagaatgcgaaggaagtaaagcttcctgcgtactcaaagtagataaaccctcatcgcccgcgtgtgagagaagaccttcgtccccgtccagatgcgagagaatgaataaccctggaaaacaagttccgtttatgaggacggacatgctacaaaatatgttcgcggctaatcgcgataatgtagcttctagacttttgtcctaaaatactattatatccttttcgatattaataaatccgtgtcgtccaggttttttatctctttcagtatgtgaatagataggtattttatctctattcatcatcgaatttaagagatccgataaacattgtttgtattctccagatgtcagcatctgatacaacaatatatgtgcacataaacctctggcacttatttcatgtaccttccccttatcactaaggagaatagtatttgagaaatatgtatacatgatattatcatgaattagatatacagaatttgtaacactctcgaaatcacacgatgtgtcggcgttaagatctaatatatcactcgataacacattttcatctagatacactagacattttttaaagctaaaatagtctttagtagtaacagtaactatgcgattattttcatcgatgatacatttcatcggcatattattacgcttaccatcaaagactataccatgtgtatatctaacgtattctagcatggttgccatacgcgcattaaacttttcaggatctttggatagatcttccaatctatctatttgagaaaacatttttatcatgttcaatagttgaaacgtcggatccactatatagatattatctataaagattttaggaactacgttcatggtatcctggcgaatattaaaactatcaatgatatgattatcgttttcatcttttatcaccatatagtttctaagatatgggattttacttaatataatattatttcccgtgataaattttattagaaaggccaaatctataagaaaagtcctagaattagtctgaagaatatctatatcgccgtatagtatatttggattaattagatatagagaatatgatccgtaacatatacaacttttattatggcgtctaagatattcttccatcaacttattaacatttttgactagggaagatacattatgacgtcccattacttttgccttgtctattactgcgacgttcatagaatttagcatatctcttgccaattcttccattgatgttacattataagaaattttagatgaaattacatttggagctttaatagtaagaactcctaatatgtccgtgtatgtggtcactaatacagattgtagttctataatcgtaaataatttacctatattatatgtttgagtctgtttagaaaagtagctaagtatacgatcttttatttctgatgcagatgtattaacatcggaaaaaaatctttttttattcttttttactaaagatacaaatatgtctttgttaaaaacagttattttctgaatatttctagcttgtaattttaacatatgatattcgttcacactaggtactctgcctaaataggtttctataatctttaatgtaatattaggaaaagtattctgatcaggattcctattcattttgaggatttaaaactctgattattgtctaatatggtctctacgcaaactttttcacagagcgatagagtttttgataactcgtttttcttaagaaatataaaactactgtctccagagctcgctctatcttttattttatctaattcgatacaaactcctgatactggttcagaaagtaattcattaattttcagtcctttatagaagatatttaatatagataatacaaaatcttcagtttttgatatcgatctgattgatcctagaactagatatattaataacgtgctcattaggcagtttatggcagcttgataattagatatagtatattccagttcatatttattagataccgcattgcccagattttgatattctatgaattcctctgaaaataaatccaaaataactagacattctattttttgtggattagtgtactctcttccctctatcatgttcactactggtgtccacgatgataaatatctagagggaatataatatagtccataggatgccaatctagcaatgtcgaataactgtaattttattcttcgctcttcattatgaattgattcttgaggtataaacctaacacaaattatattattagacttttcgtatgtaatgtctttcatgttataagtttttaatcctggaatagaatctattttaatgaggcttttaaacgcagagttctccaacgagtcaaagcataatactctgttgtttttcttatatacgatgttacgattttcttctttgaatggaataggtttttgaattagtttataattacaacataatagataaggaagtgtgcaaatagtacgcggaaaaaacataatagctcccctgttttcatccatggttttaagtaaatgatcactggcttctttagtcaatggatattcgaacattaaccgtttcatcatcattggacagaatccatatttcttaatgtaaagagtgatcaaatcattgtgtttattgtaccatcttgttgtaaatgtgtattcggttatcggatctgctcctttttctattaaagtatcgatgtcgatctcgtctaagaattcaactatatcgacatatttcatttgtatacacataaccattactaacgtagaatgtataggaagagatgtaacgggaacagggtttgttgattcgcaaactattctaatacataattcttctgttaatacgtcttgcacgtaatctattatagatgccaagatatctatataattattttgtaagatgatgttaactatgtgatctatataagtagtgtaataattcatgtatttcgatatatgttccaactctgtctttgtgatgtctagtttcgtaatatctatagcatcctcaaaaaatatattcgcatatattcccaagtcttcagttctatcttctaaaaaatcttcaacgtatggaatataataatctattttacctcttctgatatcattaatgatatagtttttgacactatcttctgtcaattgattcttattcactatatctaagaaacggatagcgtccctaggacgaactactgccattaatatctctattatagcttctggacataattcatctattataccagaattaatgggaactattccgtatctatctaacatagttttaagaaagtcagaatctaagacttgatgttcatatattggttcatacatgaaatgatctctattgatgatagtgactatttcattctctgaaaattggtaactcattctatatatgctttccttgttgatgaaggatagaatatactcaatagaatttgtaccaacaaactgttctcttatgaatcgtatatcatcatctgaaataatcatgtaaggcatacatttaacaattagagacttgtctcctgttatcaatatactattcttgtgataatttatgtgtgaggcaaatttgtccacgttctttaattttgttatagtagatatcaaatccaatggagctacagttcttggcttaaacagatatagtttttctggaacaaattctacaacattattataaaggactttgggtaaataagtgggatgaaatcctattttaattaatgcgatagccttgtcctcgtgcagatatccaaacgcttttgtgatagtatggcattcattgtctagaaacgctctacgaatatctgtgacagatatcatctttagagaatatactagtcgcgttaatagtactacaatttgtattttttaatctatctcaataaaaaaattaatatgtatgattcaatgtataactaaactactaactgttattgataactagaatcagaatctaatgatgacgtacccaagaagtttatctactgccaatttagctgcattatttttagcatctcgtttagattttccatctgccttatcgaatactcttccgtcgatatctacacaggcataaaatgtaggagagttactaggcccaactgattcaatacgaaaagaccaatctctcttagttatttggcagtactcattaataacggtgacagggttagcatctttccaatcaataatttttttagccggaataacatcatcaaaagacttatgatcctctctcattgatttttcgcgggatacatcatctattatgacgtcagccataacatcagcatccggcttatccgcctccgttgtcataaaccaacgaggaggaatatcgtcggagctgtacaccatagcactacgttgaagatcgtacagagctttattaacttctcgcttctccatattaagttgtctagttagttgtgcagcagtagctccttcgattccaatggttttaatagcctcacacacaatctctgcgttagaacgttcgtcgatatagattttagacatttttagagagaactaacacaaccagcaataaaactgaacctactttatcatttttttattcatcatcctctggtggttcgtcgttcctatcaaatgtagctctgattaacccgtcatctataggtgatgctggttctggagattctggaggagatggattattatctggaagaatctctgttatttccttgttttcatgtatcgattgcgttgtaacattaagattgcgaaatgctctaaatttgggaggcttaaagtgttgtttgcaatctctacacgcgtgtctaactagtggaggttcgtcagctgctctagtttgaatcatcatcggcgtagtattcctacttttacagttaggacacggtgtattgtatttctcgtcgagaacgttaaaataatcgttgtaactcacatcctttattttatctatattgtattctactcctttcttaatgcattttataccgaataagagatagcgaaggaattctttttcggtgccgctagtacccttaatcatatcacatagtgttttatattccaaatttgtggcaatagacggtttatttctatacgatagtttgtttctggaatcctttgagtattctataccaatattattctttgattcgaatttagtttcttcgatattagattttgtattacctatattcttgatgtagtactttgatgatttttccatggcccattctattaagtcttccaagttggcatcatccacatattgtgatagtaattctcggatatcagtagcggctaccgccattgatgtttgttcattggatgagtaactactaatgtatacattttccatttataacacttatgtattaactttgttcatttatattttttcattattatgttgatattaacaaaagtgaatatatatatatgttaataattgtattgtggttatacggctacaattttataatgagtgaaagtcagtgtccgatgatcaatgacgatagctttactctgaaaagaaagtatcaaatcgatagtgcggagtcaacaataaaaatggataagaagaggataaagtttcagaatagagccaaaatggtaaaagaaataaatcagacaataagagcagcacaaactcattacgagacattgaaactaggatacataaaatttaagagaatgattaggactactactctagaagatatagcaccatctattccaaataatcagaaaacttataaactattctcggacatttcagccatcggcaaagcatcacagaatccgagtaagatggtatatgctctgctgctttacatgtttcccaatttgtttggagatgatcatagattcattcgttatagaatgcatccaatgagtaaaatcaaacacaagatcttctctcctttcaaacttaatcttattagaatattagtggaagaaagattctataataatgaatgcagatctaataaatggaaaataattggaacacaagttgataaaatgttgatagctgaatctgataaatatacaatagatgcaaggtataacctaaaacccatgtatagaatcaagggagaatctgaagaagataccctcttcatcaaacagatggtagaacaatgtgtgacatcccaggaattggtggaaaaagtgttgaagatactgtttagagatttgttcaagagtggagaatacaaagcgtacagatacgatgatgatgtagaaaatggattcattggattggatacactaaaattaaacattgttcatgatatagttgaaccatgtatgcctgttcgtaggccagtggctaagatactgtgtaaagaaatggtaaataaatactttgagaatccgctacatattattggtaaaaatcttcaagagtgcattgactttgttagtgaataggcatttcatctttctccaatactaattcaaattgttaaattaataatggatagtataaatagttattagttataagatagtaaaaataattattagaataagagtgtagtatcatagataactctcttctataaaaatggattttattcgtagaaagtatcttatatacacagtagaaaataatatagattttttaaaggatgatacattaagtaaagtaaacaattttaccctcaatcatgtactagctctcaagtatctagttagcaattttcctcaacacgttattactaaggatgtattagctaataccaatttttttgttttcatacatatggtacgatgttgtaaagtgtacgaagcggttttacgacacgcatttgatgcacccacgttgtacgttaaagcattgactaagaattatttatcgtttagtaacacaatacaatcgtacaaggaaaccgtgcataaactaacacaagatgaaaaatttttagaggttgccgaatacatggacgaattaggagaacttataggcgtaaattatgacttagttcttaatccattatttcacggaggggaacccatcaaagatatggaaatcatttttttaaaactgtttaagaaaacagacttcaaagttgttaaaaaattaagtgttataagattacttatttgggcatacctaagcaagaaagatacaggcatagagtttgcggataatgatagacaagatatatatactctatttcaacaaactggtagaatcgtccatagcaatctaacagaaacgtttagagattatatctttcccggagataagactagctattgggtgtggttaaacgaaagtatagctaatgatgcggatatcgttcttaatagacacgccattaccatgtatgataaaattcttagttatatatactctgagataaaacaaggacgcgttaataaaaacatgcttaagttagtttatatctttgagcctgaaaaagatatcagagaacttctgctagaaatcatatatgatattcctggagatatcctatctattattgatgcaaaaaacgacgattggaaaaaatattttattagtttttataaagctaattttattaacggtaatacatttattagtgatagaacgtttaacgaggacttattcagagttgttgttcaaatagatcccgaatatttcgataatgaacgaattatgtctttattctctacgagtgctgcggacattaaacgatttgatgagttagatattaataacagttatatatctaatataatttatgaggtgaacgatatcacattagatacaatggatgatatgaagaagtgtcaaatctttaacgaggatacgtcgtattatgttaaggaatacaatacatacctgtttttgcacgagtcggatcccatggtcatagagaacggaatactaaagaaactgtcatctataaaatccaagagtagacggctgaacttgtttagcaaaaacattttaaaatattatttagacggacaattggctcgtctaggtcttgtgttagatgattataaaggagacttgttagttaaaatgataaaccatcttaagtctgtggaggatgtatccgcattcgttcgattttctacagataaaaaccctagtattcttccatcgctaatcaaaactattttagctagttataatatttccatcatcgtcttatttcaaaggtttttgagagataatctatatcatgtagaagaattcttggataaaagcatccatctaaccaagacggataagaaatatatacttcaattgataagacacggtagatcatagaacagaccaaatatattattaataatttggtatatacatagatataattatcacacatttttgataaatgggaactgctgcaacaattcagactcccaccaaattaatgaataaagaaaatgcagaaatgattttggaaaaaattgttgatcatatagttatgtatattagtgacgaatcaagtgattcagaaaataatcctgaatatattgattttcgtaacagatacgaagactatagatctctcattataaaaagtgatcacgagtttgtaaagctatgtaaaaatcatgcggagaaaagttctccagaaacgcaacaaatgattatcaaacacatatacgaacaatatcttattccagtatctgaagtactattaaaacctataatgtccatgggtgacataattacatataacggatgtaaagacaatgaatggatgctagaacaactctctaccctaaactttaacaatctccgcacatggaactcatgtagcataggcaatgtaacgcgtctgttttatacattttttagttatctgatgaaagataaactaaatatataagtataatcccattctaatactttaacctgatgtattagcatcttattagaatattaacctaactaaaagacataacataaaaactcattacatagttgataaaaagcggtaggatataaatattatggctgccaccgttccgcgttttgacgacgtgtacaaaaatgcacaaagaagaattctagatcaagaaacattttttagtagaggtctaagtagaccgttaatgaaaaacacatatctatttgataattacgcgtatggatggataccagaaactgcaatttggagtagtagatacgcaaacttagatgcaagtgactattatcccatttcgttgggattacttaaaaagttcgagtttctcatgtctctatataaaggtcctattccagtatacgaagaaaaagtaaatactgaattcattgctaatggatctttctccggtagatacgtatcatatcttagaaagttttctgctcttccaacaaacgagtttattagttttttgttactgacttccattccaatctataatatcttgttctggtttaaaaatactcagtttgatattactaaacacacattattcagatacgtctatacagataatgccaaacacctggcgttggctaggtatatgtatcaaacaggagactataagcctttgtttagtcgtctcaaagagaattatatatttaccggtcccgttccaatatgtatcaaagatatagatcaccctaatcttagtagagcaagaagtccatccgattatgagacattagctaatattagtactatattgtactttaccaagtatgatccggtattaatgtttttattgttttacgtacctgggtattcaattactacaaaaattactccagccgtagaatatctaatggataaactgaatctaacaaagagcgacgtacaactgttgtaaattattttatgcttcgtaaaatgtaggttttgaaccaaacattctttcaaagaatgagatgcataaaactttattatccaatagattgactatttcggacgtcaatcgtttaaagtaaacttcgtaaaatattctttgatcactgccgagtttaaaacttctatcgataattgtttcatatgttttaatatttacaagttttttggtccatggtccattaggacaaatatatgcaaaataatatcgttctccaagttctatagtctctggattatttttattatattcagtaaccaaatacatattagggttatctgcggatttataatttgagtgatgcattcgactcaacataaataattctagaggagacgatctactatcaaattcggatcgtaaatctgtttctaaagaacggagaatatctatacatacctgattagaattcatccgtccttcagacaacatctcagacagtctggttttgtacatcttaatcatattcttatgaaacttggaaacatctcttctagtttcactagtacctttattaattctctcaggtacagattttgaattcgacgatgctgagtatttcatcgttgtatatttcttcttcgattgcataatcagattcttatataccgcctcaaactctattttaaaattattaaacaatactctattattaatcagtcgttctaactctttcgctatttctatagacttatctacatcttgactgtctatctctgtaaacacggagtcggtatctccatacacgctacgaaaacgaaatctgtaatctataggcaacgatgttttcacaatcggattaatatctctatcgtccatataaaatggattacttaatggattggcaaaccgtaacataccgttagataactctgctccatttagtaccgattctagatacaagatcattctacgtcctatggatgtgcaactcttagccgaagcgtatgagtatagagcactatttctaaatcccatcagaccatatactgagttggctactatcttgtacgtatattgcatggaatcatagatggccttttcagttgaactggtagcctgttttagcatctttttatatctggctctctctgccaaaaatgttcttaatagtctaggaatggttccttctatcgatctatcgaaaattgctatttcagagatgaggttcggtagtctaggttcacaatgaaccgtaatatatctaggaggtggatatttctgaagcaatagctgattatttatttcttcttccaatctattggtactaacaacgacaccgactaatgtttccggagatagatttccaaagatacacacattaggatacagactgttataatcaaagattaatacattattactaaacattttttgttttggagcaaataccttaccgccttcataaggaaacttttgttttgtttctgatctaactaagatagttttagtttccaacaatagctttaacagtggacccttgatgactgtactcgctctatattcgaataccatggattgaggaagcacatatgttgacgcacccgcgtctgtttttgtttctactccataatactcccacaaatactgacacaaacaagcatcatgaatacagtatctagccatatctaaagctatgtttagattataatccttatacatctgagctaaatcaacgtcatcctttccgaaagataatttatatgtatcattaggtaaagtaggacataatagtacgactttaaatccattttcccaaatatctttacgaattactttacatataatatcctcatcaacagtcacataattacctgtggttaaaacctttgcaaatgcagcggctttgcctttcgcgtctgtagtatcgtcaccgatgaacgtcatttctctaactcctctatttaatactttacccatgcaactgaacgcgttcttggatatagaatccaatttgtacgaatccaatttttcaaatttttgaatgaatgaatatagatcgaaaaatatagttccattattgttattaacgtgaaacgtagtattggccatgccgcctactcccttatgactagactgatttctctcataaatacagagatgtacagcttcctttttgtccggagatctaaagataattttctctcctgttaataactctagacgattagtaatatatctcagatcaaagttatgtccgttaaaggtaacgacgtagtcgaacgttagttccaacaattgtttagctattcgtaacaaaactatttcagaacatagaactagttctcgttcgtaatccatttccattagtgactgtatcctcaaacatcctctatcgacggcttcttgtatttcctgttccgttaacatctcttcattaatgagcgtaaacaataatcgtttaccacttaaatcgatataacagtaacttgtatgcgagattgggttaataaatacagaaggaaacttcttatcgaagtgacactctatatctagaaataagtacgatcttgggatatcgaatctaggtatttttttagcgaaacagttacgtggatcgtcacaatgataacatccattgttaatctttgtcaaatattgctcgtccaacgagtaacatccgtctggagatatcccgttagaaatataaaaccaactaatattgagaaattcatccatggtggcattttgtatgctgcgtttctttggctcttctatcaaccacatatctgcgacggagcattttctatctttaatatctagattataacttattgtctcgtcaatgtctatagttctcatctttcccaacggcctcgcattaaatggaggaggagacaatgactgatatatttcgtccgtcactacgtaataaaagtaatgaggaaatcgtataaatacggtctcaccatttcgacatctggatttcagatataaaaatctgttttcaccgtgactttcaaaccaattaatgcaccgaacatccatttatagaatttagaaatatattttcatttaaatgaatcccaaacattggggaagagccgtatggaccattatttttatagtactttcgcaagcgggtttagacggcaacatagaagcgtgtaaacgaaaactatatactatagttagcactcttccatgtcctgcatgtagacggcacgcgactatcgctatagaggacaataatgtcatgtctagcgatgatctgaattatatttattattttttcatcagattatttaacaatttggcatctgatcccaaatacgcgatcgatgtgacaaaggttaaccctttataaacttaacccattataaaacttatgattagtcacaactgaaataaccgcgtgattattttttggtataattctacacggcatggtttctgtgactatgaattcaacccccgttacattagtgaaatctttaacaaacagcaagggttcgtcaaagacataaaactcattgtttacaatcgaaatagaccccctatcacacttaaaataaaaaatatccttatcctttaccaccaaataaaattctgattggtcaatgtgaatgtattcacttaacagttccacaaatttatttattaactccgaggcacatacatcgtcggtattttttatggcaaactttactcttccagcatccgtttctaaaaaaatattaacgagttccatttatatcatccaatattattgaaatgacgttgatggacagatgatacaaataagaaggtacggtacctttgtccaccatctcctccaattcatgctctattttgtcattaactttaatgtatgaaaacagtacgccacatgcttccatgacagtgtgtaacactttggatacaaaatgtttgacattagtataattgttcaagactgtcaatctataatagatagtagctataatatattctatgatggtattgaagaagatgacaaccttggcatattgatcatttaacacagacatggtatcaacagatagcttgaatgaaagagaatcagtaattggaataagcgtcttctcgatagagtgtccgtataccaacatgtctgatattttgatgtattccattaaattatttagttttttctttttattctcgttaaacagcatttctgtcaacggaccccaacatcgttgaccgattaagttttgattgatttttccgtgtaaggcgtatctagtcagatcgtatagcctatccaataatccatcatctgtgcgtagatcacatcgtacactttttaattctctatagaagagcgacagacatctggagcaattacagacagcaatttctttattctctacagatgtaagatacttgaagacattcctatgatgatgcagaattttggataacacggtattgatggtatctgttaccataattcctttgatggctgatagtgtcagagcacaagatttccaatctttgacaatttttagcaccattatctttgttttgatatctatatcagacagcatggtgcgtctgacaacacagggattaagacggaaagatgaaatgattctctcaacatcttcaatagataccttgctattttttctggcattatctatatgtgcgagaatatcctctagagaatcagtatcctttttgatgatagtggatctcaatgacatgggacgtttaaaccttcttattctatcaccagattgcatggtgatttgtcttctttcttttatcataatgtaatctctaaattcatcggcaaattgtctatatctaaaatcataatatgagatgtttacctctacaaatatctgttcgtccaatgttagagtatttacatcagttttgtattccaaattaaacatggcaacggatttaattttatattcctctattaagtcctcgtcgataataacagaatgtagataatcatttaatccatcgtacatggttggaagatgcttgttgacaaaatctttaattgtcttgatgaaggtgggactatatctaacatcttgattaataaaatttataacattgtccataggatactttgtaactagttttatacacatctcttcatcggtaagtttagacagaatatcgtgaacaggtggtatattatattcatcagatatacgaagaacaatgtccaaatctatattgtttaatatattatatagatgtagcgtagctcctacaggaatatctttaactaagtcaatgatttcatcaaccgttagatctattttaaagttaatcatataggcattgatttttaaaaggtatgtagccttgactacattctcattaattaaccattccaagtcactgtgtgtaagaagattatattctatcataagcttgactacatttggtcccgataccattaaagaattcttatgatataaggaaacagcttttaggtactcatctactctacaagaattttggagagccttaacgatatcagtgacgtttattatttcaggaggaaaaaacctaacattgagaatatcggaattaatagcttccagatacagtgattttggcaatagtccgtgtaatccataatccagtaacacgagctggtgcttgctagacaccttttcaatgtttaatttttttgaaataagctttgataaagccttcctcgcaaattccggatacatgaacatgtcggcgacatgattaagtattgttttttcattattttctcaataccccaatagatgatagaatatcacccaatgcgtccatgttgtctatttccaacaggtcgctatatccaccaatagaagtttttccaaaaaagattctaggaacagttctaccaccagtaatttgttcaaaatagtcacgcaattcattttcgggtttaaattctttaatatcgacaatttcatacgctcctcttttgaaactaaacttatttagaatatccagtgcatttctacaaaaaggacatgtatacttgacaaaaattgtcactttgttattggccaacctttgttgtacaaattcctcggccattttaatatttaagtgatataaaactatctcgacttatttaactctttagtcgagatatatggacgcagatagctatatgatagccaactacagaaggcaaacgctataaaaaacataattacgacgagcatatttataaatatttttattcagcattacttgatatagtaatattaggcacagtcaaacattcaaccactctcgatacattaactctctcattttctttaacaaattctgcaatatcttcgtaaaaagattcttgaaactttttagaatatctatcgactctagatgaaatagcgttcgtcaacatactatgttttgtatacataaaggcgcccattttaacagtttctagtgacaaaatgctagcgatcctaggatcctttagaatcacatagattgacgattcgtctctcttagtaactctagtaaaataatcatacaatctagtacgcgaaataatattatccttgacttgaggagatctaaacaatctagttttgagaacatcgataagttcatcgggaatgacatacatactatctttaatagaactcttttcatccagttgaatggattcgtccttaaccaactgattaatgagatcttctattttatcattttccagatgatatgtatgtccattaaagttaaattgtgtagcgcttctttttagtctagcagccaatactttaacatcactaatatcgatatacaaaggagatgatttatctatggtattaagaattcgtttttcgacatccgtcaaaaccaattcctttttgcctgtatcatccagttttccatcctttgtaaagaaattattttctactagactattaataagactgataaggattcctccataattgcacaatccaaactttttcacaaaactagactttacaagatctacaggaatgcgtacttcaggttttttagcttgtgattttttcttttgcggacattttctagtaaccaactcatctaccatttcattgattttagcagtgaaataagctttcaatgcacgggcactgatactattgaaaacgagttgatcttcaaattccgccatttaagttcaccaaacaacttttaaatacaaatatatcaatagtagtagaataagaactataaaaaaaataataattaaccaataccaaccccaacaaccggtattattagttgatgtgactgttttctcatcacttagaacagatttaacaatttctataaagtctgtcaaatcatcttccggagaccccataaatacaccaaatatagcggcgtacaacttatccatttatacattgaatattggcttttctttatcgctatcttcatcatattcatcatcaatatcaacaagtcccagattacgagccagatcttcttctacattttcagtcattgatacacgttcactatctccagagagtccgataacgttagccaccacttctctatcaatgattagtttcttgagcgcgaaagtaatttttgtttccgttccggatctatagaagacgataggtgtgataattgccttagccaattgtctttctcttttactgagtgattctagttcaccttctatagatctgagaatggatgattctccagtcgaaacatattctaccatggatccgtttaatttgttgatgaagatggattcatccttaaatgttttctctgtaatagtttccaccgaaagactatgcaaagaatttggaatgcgttccttgtgcttaatgtttccatagacggcttctagaagttgatacaacataggactagccgcggtaacttttatttttagaaagtatccatcgcttctatcttgtttagatttatttttataaagtttagtctctccttccaacataataaaagtggaagtcatttgactagataaactatcagtaagttttatagagatagacgaacaattagcgtattgagaagcatttagtgtaacgtattcgatacattttgcattagatttactaatcgattttgcatactctataacacccgcacaagtctgtagagaatcgctagatgcagtaggtcttggtgaagtttcaactctcttcttgattaccttactcatgattaaacctaaataattgtactttgtaatataatgatatatattttcactttatctcatttgagaataaaaatgtttttgtttaaccactgcatgatgtacagatttcggaatcgcaaaccaccagtggttttattttatccttgtccaatgtgaattgaatgggagcggatgcgggtttcgtacgtagatagtacattcccgtttttagaccgagactccatccgtaaaaatgcatactcgttagtttggaataactcggatctgctatatggatattcatagattgactttgatcgatgaaggctcccctgtctgcagccatttttatgatcgtcttttgtggaatttcccaaatagttttataaactcgcttaatatcttctggaaggtttgtattctgaatggatccaccatctgccataatcctattcttgatctcatcattccataattttctctcggttaaaactctaaggagatgcggattaactacttgaaattctccagacaatactctccgagtgtaaatattactggtatacggttccaccgactcattatttcccaaaatttgagcagttgatgcagtcggcataggtgccaccaataaactatttctaagaccgtatgttctgattttatcttttagaggttcccaattccaaagatccgacggtacaacattccaaagatcatattgtagaataccgttactggcgtacgatcctacatatgtatcgtatggtccttccttctcagctagttcacaactcgcctctaatgcaccgtaataaatggtttcgaagatcttcttatttagatcttgtgcttccaggctatcaaatggataatttaagagaataaacgcgtccgctaatccttgaacaccaataccgataggtctatgtctcttattagagatttcagcttctggaataggataataattaatatctataattttattgagatttctgacaattactttgaccacatccttcagtttgagaaaatcaaatcgcccatctattacaaacatgttcaaggcaacagatgccagattacaaacggctacctcattagcatccgcatattgtattatctcagtgcaaagattactacacttgatagttcctaaattttgttgattactctttttgttacacgcatccttataaagaatgaatggagtaccagtttcaatctgagattctataatcgctttccagacgactcgagcctttattatagatttgtatctcctttctctttcgtatagtgtatacaatcgttcgaactcgtctccccaaacattgtccaatccaggacattcatccggacacatcaacgaccactctccgtcatccttcactcgtttcataaagagatcaggaatccaaagagctataaatagatctctggttctatgttcctcgtttcctgtattctttttaagatcgaggaacgccataatatcagaatgccacggttccaagtatatggccataactccaggccgtttgtttcctccctgatctatgtatctagcggtgttattataaactctcaacattggaataataccgtttgatataccattggtaccggagatatagcttccactggcacgaatattactaattgatagacctattccccctgccattttagagattaatgcgcatcgttttaacgtgtcatagataccctctatgctatcatcgatcatgttaagtagaaaacagctagacatttggtgacgactagttcccgcattaaataaggtaggagaagcgtgcgtaaaccatttttcagaaagtagattgtacgtctcaatagctgagtctatatcccattgatgaattcctactgcgacacgcattaacatgtgctgaggtctttcaacgatcttgttgtttattttcaacaagtaggatttttccaaagttttaaaaccaaaatagttgtatgaaaagtctcgttcgtaaataataaccgagttgagtttatccttatatttgttaactatatccatggtgatacttgaaataatcggagaatgtttcccatttttaggattaacatagttgaataaatcctccatcacttcactaaatagtttttttgtttccttgtgtagatttgatacggctattctggcggctagaatggcataatccggatgttgtgtagtacaagtggctgctatttcggctgccagagtgtccaattctaccgttgttactccattatatattccttgaataaccttcatagctattttaataggatctatatgatccgtgtttaagccataacataattttctaatacgagacgtgattttatcaaacatgacattttccttgtatccatttcgtttaatgacaaacatttttgttggtgtaataaaaaaattatttaacttttcattaatagggatttgacgtatgtagcgtacaaaatgatcgttcctggtatatagataaagagtcctatatatttgaaaatcgttacggctcgattaaactttaatgattgcatagtgaatatatcattaggatttaactccttgactatcatggcggcgccagaaattaccatcaaaagcattaatacagttatgccgatcgcagttaaaacggttatagcatccaccatttatatctaaaaattagatcaaagaatatgtgacaaagtcctagttgtatactgagaattgacgaaacaatgtttcttacatatttttttcttattagtaactgacttaatagtaggaactggaaagctagacttgattattctataagtatagatacccttccagataatgttctctttgataaaagttccagaaaatgtagaattttttaaaaagttatcttttgctattaccaagattgtgtttagacgcttattattaatatgagtgatgaaatccacaccgcctctagatatcgcctttatttccacattagatggtaaatccaatagtgaaactatctttttaggaatgtatggactcgcgtttagaggagtgaacgtcttgggcgtcggaaaggatgattcgtcaaacgaataaacaatttcacaaatggatgttaatgtattagtaggaaattttttgacgctagtggaattgaagattctaatggatgatgttctacctatttcatccgataacatgttaatttccgacaccaacggttttaatatttcgatgatatacggtagtctctctttcggacttatatagcttattccacaatacgagtcattatatactccaaaaaacaaaataactagtataaaatctgtatcgaatgggaaaaacgaaattatcgacataggtatagaatccggaacattgaacgtattaatacttaattctttttctgtggtaagtaccgataggttattgacattgtatggttttaaatattctataacttgagacttgatagatattagtgatgaattgaaaattatttttatcaccacgtgtgtttcaggatcatcgtcgacgcccgtcaaccaaccgaatggagtaaaataaatatcattaatatatgctctagatattagtatttttattaatcctttgattatcatcttctcgtaggcgaatgattccatgatcaagagtgatttgagaacatcctccggagtattaatgggcttagtaaacagtccatcgttgcaataataaaagttatccaagttaaaggatattatgcattcgtttaaagatatcacctcatctgacggagacaattttttggtaggttttagagactttgaagctacttgtttaacaaagttattcatcgtcgtctactattctatttaattttgtagttaatttatcacatatcacattaattgactttttggtccatttttccatacgtttatattcttttaatcctgcgttatccgtttccgttatatccagggatagatcttgcaagttaaatagaatgctcttaaataatgtcattttcttatccgctaaaaatttaaagaatgtataaacctttttcagagatttgaaactcttaggtggtgtcctagtacacaatatcataaacaaactaataaacattccacattcagattccaacagctgattaacttccacattaatacagcctattttcgctccaaatgtacattcgaaaaatctgaataaaacatcgatgtcacaatttgtattatccaatacagaatgtttgtgattcgtgttaaaaccatcggagaaggaatagaaataaaaattattatagtggtggaattcagttggaatattgcctccggagtcataaaaggatactaaacattgttttttatcataaattacacatttccaatgagacaaataacaaaatccaaacattacaaatctagaggtagaacttttaattttgtctttaagtatatacgataagatatgtttattcataaacgcgtcaaatttttcatgaatcgctaaggagtttaagaatctcatgtcaaattgtcctatataatccacttcggatccataagcaaactgagagactaagttcttaatacttcgattgctcatccaggctcctctctcaggctctattttcatcttgacgacctttggattttcaccagtatgtattcctttacgtgataaatcatcgattttcaaatccatttgtgagaagtctatcgccttagatactttttcccgtagtcgaggtttaaaaaaatacgctaacggtatactagtaggtaactcaaagacatcatatatagaatggtaacgcgtctttaactcgtcggttaactctttcttttgatcgagttcgtcgctactattgggtctgctcaggtgccccgactctactagttccaacatcataccgataggaatacaagacactttgccggcggttgtagatttatcatatttttccactacatatccgttacaatttgttaaaaatttagatacatctatattgctacataatccagctagtgaatatatatgacataataaattggtaaatcctagttctggtattttactaattactaaatctgtatatctttccatttatcatggaaaagaatttaccagatatcttcttttttccaaactgcgttaatgtattctcttacaaatattcacaagatgaattcagtaatatgagtaaaacggaacgtgatagtttctcattggccgtgtttccagttataaaacatagatggcataacgcacacgttgtaaaacataaaggaatatacaaagttagtacagaagcacgtggaaaaaaagtatctcctccatcactaggaaaacccgcacacataaacctaaccgcgaagcaatatatatacagtgaacacacaataagctttgaatgttatagttttctaaaatgtataacaaatacagaaatcaattcgttcgatgagtatatattaagaggactattagaagctggtaatagtttacagatattttccaattccgtaggtaaacgaacagatactataggtgtactagggaataagtatccatttagcaaaattccattggcctcattaactcctaaagcacaacgagagatattttcagcgtggatttctcatagacctgtagttttaactggaggaaccggagtgggtaagacgtcacaggtacccaagttattgctttggtttaattatttatttggtggattctctactctagataaaattactgactttcacgaaagaccagtcattctatctcttcctaggatagctttagttagattgcatagcaataccattttaaaatcattgggatttaaggtactagatggatctcctatttctttacggtacggatctataccggaagaattaataaacaaacaaccaaaaaaatatggaattgtattttctacccataagttatctctaacaaaactatttagttatggcactcttattatagacgaagttcatgagcatgatcaaataggagatattattatagcagtagcgagaaagcatcatacgaaaatagattctatgtttttaatgactgccacattagaggatgaccgagaacggctaaaagtatttttacctaatcccgcatttatacatattcctggagatacactgtttaaaattagcgaggtatttattcataataagataaatccatcttccagaatggcatacatagaagaagaaaagagaaatttagttactgctatacagatgtatactcctcctgatggatcatccggtatagtctttgtggcatccgttgcacagtgtcacgaatataaatcatatttagaaaaaagattaccgtatgatatgtatattattcatggtaaggtcttagatatagacgaaatattagaaaaagtgtattcatcacctaatgtatcgataattatttctactccttatttggaatccagcgttactatacgcaatgttacacacatttatgatatgggtagagtttttgtccccgctccttttggaggatcgcaacaatttatttctaaatctatgagagatcaacgaaaaggaagagtaggaagagttaatcctggtacatacgtctatttctatgatctgtcttatatgaagtctatacagcgaatagattcagaatttctacataattatatattgtacgctaataagtttaatctaacactccccgaagatttgtttataatccctacaaatttggatattctatggcgtacaaaggaatatatagactcgttcgatattagtacagaaacatggaataaattattatccaattattatatgaagatgatagagtatgctaaactttatgtactaagtcctattctcgctgaggagttggataactttgagaggacgggagaattaactagtattgtacgagaagccattttatctctaaatttacgaattaagattttaaattttaaacataaagatgatgatacgtatatacacttttgtaaaatattattcggtgtctataacggaacaaacgctactatatattatcatagacctctaacgggatatatgaatatgatttcagatactatatttgttcctgtagataataactaaaaatcaaactctaatgaccacatctttttttagagatgaaaaattttccacatctccttttgtagacacgactaaacattttgcagaaaaaagtttattagtgtttagataatcgtatacttcatcagtgtagatagtaaatgtgaacagataaaaggtattcttgctcaatagattggtaaattccatagaatatattaatcctttcttcttgagatcccacatcatttcaaccagagacgttttatccaatgatttacctcgtactataccacatacaaaactagattttgcagtgacgtcgtacctggtattcctaccaaacaaaattttacttttagttcttttagaaaattctaaggtagaatctctatttgccaatatgtcatctatggaattaccactagcaaaaaatgatagaaatatatattgatacatcgcagctggttttgatctactatactttaaaaacgaatcagattccataattgcctgtatatcatcagctgaaaaactatgttttacacgtattccttcggcatttctttttaatgatatatcttgtttagacaatgataaagttatcatgtccatgagagacgcgtctccgtatcgtataaatatttcattagatgttagacgcttcattaggggtatacttctataaggtttcttaatcagtccatcattggttgcgtcaagaactactatcggatgttgttgggtatctctagtgttacacatggccttactaaagtttgggtaaataactatgatatctctattaattatagatgcatatatttcattcgtcaaggatattagtatcgacttgctatcgtcattaatacgtgtaatgtaatcatataaatcatgcgatagccaaggaaaatttaaatagatgttcatcatataatcgtcgctataattcatattaatacgttgacattgactaatttgtaatatagcctcgccacgaagaaagctctcgtattcagtttcatcgataaaggataccgttaaatataactggttgccgatagtctcatagtctattaagtggtaagtttcgtacaaatacagaatccctaaaatattatctaatgttggattaatctttaccataactgtataaaatggagacggagtcataactattttaccgtttgtacttactggaatagatgaaggaataatctccggacatgctggtaaagacccaaatgtctgtttgaagaaatccaatgttccaggtcctaatctcttaacaaaaattacgatattcgatcccgatatcctttgcattctatttaccagcatatcacgaactatattaagattatctatcatgtctattctcccaccgttatataaatcgcctccgctaagaaacgttagtatatccatacaatggaatacttcatttctaaaatagtattcgttttctaattctttaatgtgaaatcgtatactagaaagggaaaaattatctttgagttttccgttagaaaagaaccacgaaactaatgttctgattgcgtccgattccgttgctgaattaatggatttacaccaaaaactcatataacttctagatgtagaagcattcgctaaaaaattagtagaatcaaaggatataagtagatgttccaacaagtgagcaattcccaagatttcatctatatcattctcgaatccgaaattagaaattcccaagtagatatcctttttcatccgatcgttgatgaaaatacgaactttattcggtaagacaatcatttactaaggagtaaaataggaagtaatgttcgtatgtcgttatcatcgtataaattaaaggtgtgttttttaccattaagtgacattataattttaccaatattggaattataatataggtgtatttgcgcactcgcgacggttgatgcatcggtaaatatagctgtatctaatgttctagtcggtatttcatcatttcgctgtctaataatagcgttttctctatctgtttccattacagctgcctgaagtttattggtcggataatatgtaaaataataagaaatacatacgaataacaaaaataaaataagatataataaagatgccatttagagatctaattttgtttaacttgtccaaattcctacttacagaagatgaggaatcgttggagatagtgtcttccttatgtagaggatttgaaatatcttataatgacttgataacttactttccagataggaaataccataaatatatttataaagtatttgaacatgtagatttatcggaggaattaagtatggaattccatgatacaactctgagagatttagtctatcttagattgtacaagtattccaagtgtatacggccgtgttataaattaggagataatctaaaaggcatagttgttataaaggacaggaatatttatattagggaagcaaatgatgacttgatagaatatctcctcaaggaatacactcctcagatttatacatattctaatgagcgcgtccccataactggttcaaaattaattctttgtggattttctcaagttacatttatggcgtatacaacgtcgcatataacaacaaataaaaaggtagatgttctcgtttccaaaaaatgtatagatgaactagtcgatccaataaattatcaaatacttcaaaatttatttgataaaggaagcggaacaataaacaaaatactcaggaagatattttattcggtaacaggtggccaaactccataggtagctttttctatttcggattttagaatttccaaattcaccagcgatttatcggttttggtgaaatccaaggatttattaatgtccacaaatgccatttgttttgtctgtggattgtatttgaaaatggaaacgatgtagttagatagatgcgctgcaaagtttcctattagggttccgcgctttacgtcacccagcatacttgaatcaccatcctttaaaaaaaatgataagatatcaacatggagtatatcatactcggattttaattcttctactgcatcactgacattttcacaaatactacaatacggtttaccgaaaataatcagtacgttcttcatttatgggtatcaaaaacttaaaatcgttactgctggaaaataaatcactgacgatattagatgataatttatacaaagtatacaatggaatatttgtggatacaatgagtatttatatagccgtcgccaattgtgtcagaaacttagaagagttaactacggtattcataaaatacgtaaacggatgggtaaaaaagggagggcatgtaaccctttttatcgatagaggaagtataaaaattaaacaagacgttagagacaagagacgtaaatattctaaattaaccaaggacagaaaaatgttagaattagaaaagtgtacatccgaaatacaaaatgttaccggatttatggaagaagaaataaaggcagaaatgcaattaaaaatcgataaactcacatttcaaatatatttatctgattctgataacataaaaatatcattgaatgagatactaacacatttcaacaataatgagaatgttacattattttattgtgatgaacgagacgcagaattcgttatgtgtctcgaggctaaaacacatttctctaccacaggagaatggccgttgataataagtaccgatcaggatactatgctatttgcatctgctgataatcatcctaagatgataaaaaacttaactcaactgtttaaatttgttccctcggcagaggataactatttagcaaaattaacggcgttagtgaatggatgtgatttctttcctggactctatggggcatctataacacccaccaacttaaacaaaatacaattgtttagtgattttacaatcgataatatagtcactagtttggcaattaaaaattattatagaaagactaactctaccgtagacgtgcgtaatattgttacgtttataaacgattacgctaatttagacgatgtctactcgtatattcctccttgtcaatgcactgttcaagaatttatattttccgcattagatgaaaaatggaatgaatttaaatcatcttatttagaaagcgtgccgttaccctgccaattaatgtacgcgttagaaccacgcaaggagattgatgtttcagaagttaaaactttatcatcttatatagatttcgaaaatactaaatcagatatcgatgttataaaatctatatcctcgatcttcggatattctaacgaaaactgtaacacgatagtattcggcatctataaggataatttactactgagtataaataattcattttactttaacgatagtctgttaataaccaatactaaaagtgataatataataaatataggttactagattaaaaatggtgttccaactcgtgtgctctacatgcggtaaagatatttctcacgaacgatataaattgattatacgaaaaaaatcattaaaggatgtactcgtcagtgtaaagaacgaatgttgtaggttaaaattatctacacaaatagaacctcaacgtaacttaacagtgcaacctctattggatataaactaatatggatccggttaattttatcaagacatatgcgcctagaggttctattatttttattaattataccatgtcattaacaagtcatttgaatccatcgatagaaaaacatgtgggtatttattatggtacgttattatcggaacacttggtagttgaatctacctatagaaaaggagttcgaatagtcccattggatagtttttttgaaggatatcttagtgcaaaagtatacatgttagagaatattcaagttatgaaaatagcagctgatacgtcattaactttattgggtattccgtatggatttggtcataatagaatgtattgttttaaattggtagctgactgttataaaaatgccggtattgatacatcgtctaaacgaatattgggcaaagatatttttctgagccaaaacttcacagacgataatagatggataaagatatatgattctaataatttaacattttggcaaattgattaccttaaagggtgagttaatatgcataactactcctccgttgttttttccctcgttctttttcttaacgttgtttgccatcactctcataatgtaaagatattctaaaatggtaaacttttgcatatcggacgcagaaattggtataaatgttgtaattgtattatttcccgtcaatggactagtcacagctccatcagttttatatcctttagagtatttctcactcgtgtctaacattctagagcattccatgatctgtttatcgttgatattggccggaaagatagattttttattttttattatattactattggcaattgtagatataacttctggtaaatatttttctaccttttcaatctcttctattttcaagccggctatatattctgctatattgttgctagtatcaataccttttctggctaagaagtcatatgtggtattcactatatcagttttaactggtagttccattagcctttccacttctgcagaataatcagaaattggttctttaccagaaaatccagctactataataggctcaccgatgatcattggcaaaatcctatattgtaccagattaatgagagcatatttcatttccaataattctgctagttcttgagacattgatttatttgatgaatctagttggttctctagatactctaccatttctgccgcatacaataacttgttagataaaatcagggttatcaaagtgtttagcgtggctagaatagtgggcttgcatgtattaaagaatgcggtagtatgagtaaaccgttttaacgaattatatagtctccagaaatctgtggcgttacatacatgagccgaatgacatcgaagattgtccaatatttttaatagctgctctttgtccattatttctatatttgactcgcaacaattgtagataccattaatcaccgattcctttttcgatgccggacaatagcacaattgtttagctttggactctatgtattcagaattaatagatatatctctcaatacagattgcactatacattttgaaactatgtcaaaaattgtagaacgacgctgttctgcagccatttaactttaaataatttacaaaaatttaaaatgagcatccgtataaaaatcgataaactgcgccaaattgtggcatatttttcagagttcagtgaagaagtgtctataaatgtagactcgacggatgagttaatgtatatttttgccgccttgggcggatctgtaaacatttgggcaattatacctctaagtgcatcagtgttttaccgaggagccgaaaatattgtgtttaatcttcctgtgtccaaggtaaaatcgtgtttgtgtagttttcacaatgatgccatcatagatatagaacctgatctggaaaataatctagtaaaactttctagttatcatgtagtaagtgtcgattgtaacaaggaactgatgcctattaggacagatactactatttgtctaagtatagatcaaaagaaatcttacgtgtttaattttcacaagtatgaagaaaaatgttgtggtagaaccgtcattcatctagaatggttgttgggctttatcaagtgtattagtcagcatcagcatctggctattatgtttaaagatgacaatattattatgaagactcctggtaatactgatgcgttttccagggaatattctatgactgaatgttctcaagaactacaaaagttttctttcaaaatagctatctcgtctctcaacaaactacgaggattcaaaaagagagtcaatgtttttgaaactagaatcgtaatggataatgacgataacattttaggaatgttgttttcggatagagttcaatcctttaagatcaacatctttatggcgtttttagattaatactttcaatgagataaatatgggtggcggagtaagtgttgagctccctaaacgggatccgcctccgggagtacccactgatgagatgttattaaacgtggataaaatgcatgacgtgatagctcccgctaagcttttagaatatgtgcatataggaccactagcaaaagataaagaggataaagtaaagaaaagatatccagagtttagattagtcaacacaggacccggtggtctttcggcattgttaagacaatcgtataatggaaccgcacccaattgctgtcgcacttttaatcgtactcattattggaagaaggatggaaagatatcagataagtatgaagagggtgcagtattagaatcgtgttggccagacgttcacgacactggaaaatgcgatgttgatttattcgactggtgtcagggggatacgttcgatagaaacatatgccatcagtggatcggttcagcctttaataggagtaatagaactgtagagggtcaacaatcgttaataaatctgtataataagatgcaaacattatgtagtaaagatgctagtgtaccaatatgcgaatcatttttgcattatttacgcgcacacaatacagaagatagcaaagagatgatcgattatattctaagacaacagtctgcggactttaaacagaaatatatgagatgtagttatcccactagagataagttagaagagtcattaaaatatgcggaacctcgagaatgttgggatccagagtgttcgaatgccaatgttaatttcttactaacacgtaattataataatttaggactttgcaatattgtacgatgtaataccagcgtgaacaacttacagatggataaaacttcctcattaagattgtcatgtggattaagcaatagtgatagattttctactgttcccgtcaatagagcaaaagtagttcaacataatattaaacactcgttcgacctaaaattgcatttgatcagtttattatctctcttggtaatatggatactaattgtagctatttaaatgggtgccgcggcaagcatacagacgacggtgaatacactcagcgaacgtatctcgtctaaattagaacaagaagcgaacgctagtgctcaaacaaaatgtgatatagaaatcggaaatttttatatccgacaaaaccatggatgtaacctcactgttaaaaatatgtgctctgcggacgcggatgctcagttggatgctgtgttatcagccgctacagaaacatatagtggattaacaccggaacaaaaagcatacgtgccagctatgtttactgctgcgttaaacattcagacgagtgtaaacactgttgttagagattttgaaaattatgtgaaacagacttgtaattctagcgcggtcgtcgataacaaattaaagatacaaaacgtaatcatagatgaatgttacggagccccaggatctccaacaaatttggaatttattaatacaggatctagcaaaggaaattgtgccattaaagcgttgatgcaattgacgactaaggccactactcaaatagcacctagacaagttgctggtacaggagttcagttttatatgattgttatcggtgttataatattggcagcgttgtttatgtactatgccaagcgtatgttgttcacatccaccaatgataaaatcaaacttattttagccaataaggaaaacgtccattggactacttacatggacacattctttagaacttctccgatggttattgctaccacggatatgcaaaactgaaaatatattgataatattttaatagattaacatggaagttatcgctgatcgtctagacgatatagtgaaacaaaatatagcggatgaaaaatttgtagattttgttatacacggtctagagcatcaatgtcctgctatacttcgaccattaattaggttgtttattgatatactattatttgttatagtaatttatatttttacggtacgtctagtaagtagaaattatcaaatgttgttggtggtgctagtcatcacattaactattttttattactttatactataatagtactagactgacttctaacaaacatctcacctgccataaataaatgcttgatattaaagtcttctatttctaacactattccatctgtggaaaataatactctgacattatcgctaattgacacatcggtgagtgatatgcctataaagtaataatcttctttgggcacatataccagtgtaccaggttctaacaacctatttactggtgctcctgtagcatactttttctttaccttgagaatatccatcgtttgcttggtcaatagcgatatgtgattttttatcaaccactcaaaaaagtaattggagtgttcatatcctctacgggctattgtctcatggccgtgtatgaaatttaagtaacacgactgtggtagatttgttctatagagccgattgccgcaaatagatagaactaccaatatgtctgtacaaatgttaaacattaattgattaacagaaaaaacaatgttcgttctgggaatagaaaccagatcaaaacaaaattcgttagaatatatgccacgtttatacatggaatataaaataactacagtttgaaaaataacagtatcatttaaacatttaacttgcggggttaatctcacaactttactgtttttgaactgttcaaaatatagcatcgatccgtgagaaatacgtttagccgcctttaatagaggaaatcccaccgcctttctggatctcaccaacgacgatagttctgaccagcaactcatttcttcatcatccacctgttttaacatataataggcaggagatagatatccgtcattgcaatattccttctcgtaggcacacaatctaatattgataaaatctccattctcttctctgcatttattatcttgtctcggtggctgattaggctgtggtcttggtttaggccttggtctatcgttgttgaatctattttggtcattaaatctttcatttcttcctggtatatttttatcacctcgtttggttggatttttgtctatattatcgtttgtaacatcggtacgggtattcatttatcacaaaaaaaacttctctaaatgagtctactgctagaaaacctcatcgaagaagataccatattttttgcaggaagtatatctgagtatgatgatttacaaatggttattgccggcgcaaaatccaaatttccaagatctatgctttctatttttaatatagtacctagaacgatgtcaaaatatgagttggagttgattcataacgaaaatatcacaggagcaatgtttaccacaatgtataatataagaaacaatttgggtctaggagatgataaactaactattgaagccattgaaaactatttcttggatcctaacaatgaagttatgcctcttattattaataatacggatatgactgccgtcattcctaaaaaaagtggtaggagaaagaataagaacatggttatcttccgtcaaggatcatcacctatcttgtgcattttcgaaactcgtaaaaagattaatatttataaagaaaatatggaatccgcgtcgactgagtatacacctatcggagacaacaaggctttgatatctaaatatgcgggaattaatgtcctgaatgtgtattctccttccacatccataagattgaatgccatttacggattcaccaataaaaataaactagagaaacttagtactaataaggaactagaatcgtatagttctagccctcttcaagaacccattaggttaaatgattttctgggactattggaatgtgttaaaaagaatattcctctaacagatattccgacaaaggattgattactataaatggagaatgttcctaatgtatactttaatcctgtgtttatagagcccacgtttaaacattctttattaagtgtttataaacacagattaatagttttatttgaagtattcgttgtattcattctaatatatgtattttttagatctgaattaaatatgttcttcatgcctaaacgaaaaatacccgatcctattgatagattacgacgtgctaatctagcgtgtgaagacgataaattaatgatctatggattaccatggatgacaactcaaacatctgcgttatcaataaatagtaaaccgatagtgtataaagattgtgcaaagcttttgcgatcaataaatggatcacaaccagtatctcttaacgatgttcttcgcagatgatgattcattttttaagtatttggctagtcaagatgatgaatcttcattatctgatatattgcaaatcactcaatatctagactttctgttattattattgatccaatcaaaaaataaattagaagctgtgggtcattgttatgaatctctttcagaggaatacagacaattgacaaaattcacagactttcaagattttaaaaaactgtttaacaaggtccctattgttacagatggaagggtcaaacttaataaaggatatttgttcgactttgtgattagtttgatgcgattcaaaaaagaatcctctctagctaccaccgcaatagatcctgttagatacatagatcctcgtcgtgatatcgcattttctaacgtgatggatatattaaagtcgaataaagtgaacaataattaattctttattgtcatcatgaacggcggacatattcagttgataatcggccccatgttttcaggtaaaagtacagaattaattagacgagttagacgttatcaaatagctcaatataaatgcgtgactataaaatattctaacgataatagatacggaacgggactatggacgcatgataagaataattttgaagcattggaagcaactaaactatgtgatgtcttggaatcaattacagatttctccgtgataggtatcgatgaaggacagttctttccagacattgtttaattctgtgagcgtatggcaaacgaaggaaaaatagttatagtagccgcactcgatgggacatttcaacgtaaaccgtttaataatattttgaatcttattccattatctgaaatggtggtaaaactaactgctgtgtgtatgaaatgctttaaggaggcttccttttctaaacgattgggtgaggaaaccgagatagagataataggaggtaatgatatgtatcaatcggtgtgtagaaagtgttacgtcggctcataatattatattttttatctaaaaaactaaaaataaacattgattaaattttaatataatacttaaaaatggatgttgtgtcgttagataaaccgtttatgtattttgaggaaattgataatgagttagattacgaaccagaaagtgcaaatgaggtcgcaaaaaaactgccgtatcaaggacagttaaaactattactaggagaattattttttcttagtaagttacagcgacacggtatattagatggtgccaccgtagtgtatataggatcggctcctggtacacatatacgttatttgagagatcatttctataatttaggagtgatcatcaaatggatgctaattgacggccgccatcatgatcctattttaaatggattgcgtgatgtaactctagtgactcggttcgttgatgaggaatatctacgatccatcaaaaaacaactgcatccttctaagattattttaatttctgatgtgagatccaaacgaggaggaaatgaacctagtacggcggatttactaagtaattacgctctacaaaatgtcatgattagtattttaaaccccgtggcgtctagtcttaaatggagatgcccgtttccagatcaatggatcaaggacttttatatcccacacggtaataaaatgttacaaccttttgctccttcatattcagctgaaatgagattattaagtatttataccggtgagaacatgagactgactcgagttaccaaattagacgctgtaaattatgaaaaaaagatgtactaccttaataagatcgtccgtaacaaagtagttgttaactttgattatcctaatcaggaatatgactattttcacatgtactttatgctgaggaccgtgtactgcaataaaacatttcctactactaaagcaaaggtactatttctacaacaatctatatttcgtttcttaaatattccaacaacatcaactgaaaaagttagtcatgaaccaatacaacgtaaaatatctagcaaaaattctatgtctaaaaacagaaatagcaagagatccgtacgcggtaataaatagaaacgtactactgagatatactaccgatatagagtataatgatttagttactttaataaccgttagacataaaattgattctatgaaaactgtgtttcaggtatttaacgaatcatccataaattatactccggttgatgatgattatggagaaccaatcattataacatcgtatcttcaaaaaggtcataacaagtttcctgtaaattttctatacatagatgtggtaatatctgacttatttcctagctttgttagactagatactacagaaactaatatagttaatagtgtactacaaacaggcgatggtaaaaagactcttcgtcttcccaaaatgttagagacggaaatagttgtcaagattctctatcgccctaatataccattaaaaattgttagatttttccgcaataacatggtaactggagtagagatagccgatagatctgttatttcagtcgctgattaatcaattagtagagatgagataagaacattataataatcaataatatatcttatatcttatatcttatatcttatatcttgtttagaaaaatgctaatattaaaatagctaacgctagtaatccaatcggaagccatttgatatctataatagggtatctaatttcctgatttaaatagcggacagctatattctcggtagctactcgtttggaatcacaaacattatttacatctaatttactatctgtaatggaaacgtttcccaatgaaatggtacaatccgatacattgcattttgttatatttttttttaaagaggctggtaacaacgcatcgcttcgtttacatggctcgtaccaacaataatagggtaatcttgtatctattcctatccgtactatgcttttatcaggataaatacatttacatcgtatatcgtctttgttagcatcacagaatgcataaatttgttcgtccgtcatgataaaaatttaaagtgtaaatataactattatttttatagttgtaataaaaagggaaatttaattgtatactttcggttctttaaaagaaactgacttgataaaaatggctgtaatctctaaggttacgtatagtctatatgatcaaaaagagattaatgctacagatattatcattagtcatgttaaaaatgacgacgatatcggtaccgttaaagatggtagactaggtgctatggatggggcattatgtaagacttgtgggaaaacggaattggaatgtttcggtcactggggtaaagtaagtatttataaaactcatatagttaagcctgaatttatttcagaaattattcgtttactgaatcatatatgtattcactgcggattattgcgttcacgagaaccgtattccgacgatattaacctaaaagagttatcgggacacgctcttaggagattaaaggataaaatattatccaagaaaaagtcatgttggaacagtgaatgtatgcaaccgtatcaaaaaattactttttcaaagaaaaaggtttgtttcgtcaacaagttggatgatattaacgttcctaattctctcatctatcaaaagttaatttctattcatgaaaagttttggccattattagaaattcatcaatatccagctaacttattttatacagactactttcccatccctccgttgattattagaccggctattagtttttggatagatagtatacccaaagagaccaatgaattaacttacttattaggtatgatcgttaagaattgtaacttgaatgctgatgaacaggttatccagaaggcggtaatagaatacgatgatattaaaattatttctaataacactaccagtatcaatttatcatatattacatccggcaaaaataatatgattagaagttatatcgtcgcccgacgaaaagatcagaccgctagatctgtaattggtcccagtacatctatcaccgttaatgaggtaggaatgcccgcatatattagaaatacacttacagaaaagatatttgttaatgcctttacagtggataaagttaaacaactattagcgtcaaaccaagttaaattttactttaataaacgattaaaccaattaacaagaatacgccaaggaaagtttattaaaaataaaatacatttattgcctggtgattgggtagaagtagctgttcaagaatatacaagtattatttttggaagacagccgtctctacatagatacaacgtcatcgcttcatctatcagagctaccgaaggagatactatcaaaatatctcccggaattgccaactctcaaaatgctgatttcgacggggatgaggaatggatgatattagaacaaaatcctaaagctgtaattgaacaaagtattcttatgtatccgacgacgttactcaaacacgatattcatggagcccccgtttatggatctattcaagatgaaatcgtagcagcgtattcattgtttaggatacaagatctttgtttagatgaagtattgaacatcttggggaaatatggaagagagttcgatcctaaaggtaaatgtaaattcagcggtaaagatatctatacttacttgataggtgaaaagattaattatccgggtctcttaaaggatggtgaaattattgcaaacgacgtagatagtaattttgttgtggctatgaggcatctgtcattggctggactcttatccgatcataagtcgaacgtggaaggtatcaactttattatcaagtcatcttatgtttttaagagatatctatctatttacggttttggggtgacattcaaagatctgagaccaaattcgacgttcactaataaattggaggccatcaacgtagaaaaaatagaacttatcaaagaagcatacgccaaatatctcaacgatgtaagagacgggaaaatagttccattatctaaagctttagaggcggactatgtggaatccatgttatccaacttgacaaatcttaatatccgagagatagaagaacatatgagacaaacgctgatagatgatccagataataacctcctgaaaatggccaaagcgggttataaagtaaatcccacagaactaatgtatattctaggtacgtatggacaacaaaggattgatggtgaaccagcagagactcgagtattgggtagagttttaccttactatcttccagactctaaggatccagaaggaagaggttatattcttaattctttaacaaaaggattaacgggttctcaatattacttttcgatgctggttgcaagatctcaatctactgatatcgtctgtgaaacatcacgtaccggaacactggctagaaaaatcattaaaaagatggaggatatggtggtcgacggatacggacaagtagttataggtaatacgctcatcaagtacgccgccaattataccaaaattctaggctcagtatgtaaacctgtagatcttatctatccagatgagtccatgacttggtatttggaaattagtgctctgtggaataaaataaaacagggattcgtttactctcagaaacagaaacttgcaaagaagacattggcgccgtttaatttcctagtattcgtcaaacccaccactgaggataatgctattaaggttaaggatctgtacgatatgattcataacgtcattgatgatgtgagagagaaatacttctttacggtatctaatatagattttatggagtatatattcttgacgcatcttaatccttctagaattagaattacaaaagaaacggctatcactatctttgaaaagttctatgaaaaactcaattatactctaggtggtggaactcctattggaattatttctgcacaggtattgtctgagaagtttacacaacaagccctgtccagttttcacactactgaaaaaagtggtgccgtcaaacaaaaacttggtttcaacgagtttaataacttgactaatttgagtaagaataagaccgaaattatcactctggtatccgatgatatctctaaacttcaatctgttaagattaatttcgaatttgtatgtttgggagaattaaatccagacatcactcttcgaaaagaaacagataggtatgtagtagatataatagtcaatagattatacatcaagagagcagaaataaccgaattagtcgtcgaatatatgattgaacgatttatctcctttagcgtcattgtaaaggaatggggtatggaaacattcattgaggatgaggataatattagatttactgtctacctaaatttcgttgaaccggaagaattgaatcttagtaagtttatgatggttcttccgggtgccgccaacaagggaaagattagtaaattcaagattcctatctctgactatacgggttatgacgacttcaatcaaacaaaaaagctcaataagatgactgtagaactcatgaatctaaaagaattgggttctttcgatttggaaaacgtcaacgtgtatcctggagtatggaatacatacgatatcttcggtatcgaggccgctcgtgaatacttgtgcgaagccatgttaaacacctatggagaagggttcgattatctgtatcagccttgtgatcttctcgctagtttactatgtgctagttacgaaccagaatcagtgaataaattcaagttcggcgcagctagtactcttaagagagctacgttcggagacaataaagcattgttaaacgcggctcttcataaaaagtcagaacctattaacgataatagtagctgccacttttttagcaaggtccctaatataggaactggatattacaaatactttatcgacttgggtcttctcatgagaatggaaaggaaactatctgataagatatcttctcaaaagatcaaggaaatggaagaaacagaagacttttaattcttatcaataacatatttttctatgatctgtcttttaaacgatggattttccacaaatgcgcctctcaagtccctcatagaatgatacacgtataaaaaatatagcataggcaatgactccttatttttagacattagatatgccaaaatcatagccccgcttctatttactcccgcagcacaatgaaccaacacgggctcgtttcgttgatcacatttagataaaaaggcggttacgtcgtcaaaatatttactaatatcggtagttgtatcatctaccaacggtatatgaataatattaatattagagttaggtaatgtatatttatccatcgtcaaatttaaaacatatttgaacttaacttcagatgatggtgcatccatagcatttttataatttcccaaatacacattattggttacccttgtcattatagtgggagatttggctttgtgcatatctccagttgaacgtagtagtaagtatttatacaaacttttcttatccatttataacgtacaaatggataaaactactttatcggtaaacgcgtgtaatttagaatacgttagagaaaaggctatagtaggcgtacaagcagccaaaacatcaacacttatattctttgttattatattggcaattagtgcgctattactctggtttcagacgtctgataatccagtctttaatgaattaacgagatatatgcgaattaaaaatacggttaacgattggaaatcattaacggatagcaaaacaaaattagaaagtgatagaggtagacttctagccgctggtaaggatgatatattcgacttcaaatgtgtggatttcggcgcctattttatagctatgcgattggataagaaaacatatctgccgcaagctattaggcgaggtactggagacgcgtggatggttaaaaaggcggcaaaggtcgatccatctgctcaacaattttgtcagtatttgataaaacacaagtctaataatgttattacttgtggtaatgagatgttaaatgaattaggttatagcggttattttatgtcaccgcattggtgttccgattttagtaatatggaatagtgttagataaatgcggtaacgaatgttcctgtaaggaaccataacagcttagatttaacgttaaagatgagcataaacataataaacaaaattacaatcaaacttataacattaatatcaaacaatccaaaaaatgaaatcagtggagtagtaaacgcgtacataactcctggataacgtttagcagctgccgttcctattctagaccaaaaatttggtttcatgttttcgaaacggtattctgcaacaagtcggggatcgtgttctacatatttggcggcattatccagtatctgcctattgatcttcatttcgttttcgattctggctatttcaaaataaaatcccgatgatagacctccagactttataatttcatctacgatgttcagcgccgtagtaactctaataatataggctgataagctaacatcataccctcctgtatatgtgaatatggcatgatttttgtccattacaagctcggttttaactttattgcctgtaataatttctctcatctgtaggatatctatttttttgtcatgcattgccttcaagacgggacgaagaaacgtaatatcctcaataacgttatcgttttctacaataactacatattctacctttttattttctaactcggtaaaaaaattagaatcccatagggctaaatgtctagcgatatttcttttcgtttcctctgtacacatagtgttacaaaaccctgaaaagaagtgagtatacttgtcatcatttctaatgtttcctccagtccactgtataaacgcataatccttgtaatgatctggatcatccttgactaccacaacatttcttttttctggcataacttcgttgtcctttacatcatcgaacttctgatcattaatatgctcatgaacattaggaaatgtttctgatggaggtctatcaataactggcacaacaataacaggagttttcaccgccgccatttagttattgaaattaatcatatacaactctttaatacgagttatattttcgtctatccattgtttcacatttacatatttcgacaaaaagatataaaatgcgtattccaatgcttctctgtttaatgaattactaaaatatacaaacacgtcactgtctggcaataaatgatatcttagaatattgtaacaatttattttgtattgcacatgttcgtgatctatgagttcttcttcgaatggcataggatctccgaatctgaaaacgtataaataggagttagaataataatatttgagagtattggtaatatataaactctttagcggtataattagtttttttctctcaatttctatttttagatgtgatggaaaaatgactaattttgtagcattagtatcatgaactctaatcaaaatcttaatatcttcgtcacacgttagctctttgaagtttttaagagatgcatcagttggttctacagatggagtaggtgcaacaattttttgttctacacatgtatgtactggagccattgttttaactataatggtgcttgtatcgaaaaactttaatgcagatagcggaagctcttcgccgcgactttctacgtcgtaattgggttctaacgccgatctctgaatggatactagttttctaagttctaatgtgattctctgaaaatgtaaatccaattcctccggcattatagatgtgtatacatcggtaaataaaactatagtatccaacgatcccttctcgcaaattctagtcttaaccaaaaaatcgtatataaccacggagatggcgtatttaagagtggattcttctaccgttttgttcttggatgtcatataggaaactataaagtccgcactactgttaagaatgattactaacgcaactatatagttcaaattaagcattttggaaacataaaataactctgtagacgatacttgactttcgaataagtttgcagacaaacgaagaaagaacagacctctcttaatttcagaagaaaactttttttcgtattcctgacgtctagagtttatatcaataagaaagttaagaattagtcggttaatgttgtatttcattacccaagtttgagatttcataatattatcaaaagacatgataatattaaagataaagcgctgactatgaacgaaatagctatatggttcgctcaagaatatagtcttgttaaacgtggaaacgataactgtatttttaatcacgtcagcggcatctaaattaaatataggtatatttattccacacactctacaatatgccacaccatcttcataataaataaattcgttagcaaaattattaattttagtgaaatagttagcgtcaactttcatagcttccttcaatctaatttgatgctcacacggtgcgaattccactctaacatcccttttccatgcctcaggttcatcgatctctataatatctagttttttgcgtttcacaaacacaggctcgtctctcgcgatgagatctgtatagtaactatgtaaatgataactagatagaaagatgtagctatatagatgacgatcctttaagagaggtataataactttaccccaatcagatagactgttgttatggtcttcggaaaaagaatttttataaatttttccagtattttccaaatatacgtacttaacatctaaaaaatccttaatgataataggaatggataatccgtctattttataaagaaatacatatcgcacattatacttttttttggaaatgggaataccgatgtgtctacataaatatgcaaagtctaaatattttttagagaatcttagttggtccaaattcttttccaagtacggtaatagatttttcatattgaacggtatcttcttaatctctggttctagttccgcattaaatgatgaaactaagtcactatttttataactaacgattacatcacctctaacatcatcatttaccagaatactgatcttcttttgtcgtaaatacatgtctaatgtgttaaaaaaaagatcatacaagttatacgtcatttcatctgtggtattcttgtcattgaaggataaactcgtactaatctcttctttaacagcctgttcaaatttatatcctatatacgaaaaaatagcaaccagtgtttgatcatccgcgtcaatattctgttctatcgtagtgtataacaatcgtatatcttcttctgtgatagtcgatacgttataaaggttgataacgaaaatatttttatttcgtgaaataaagtcatcgtaggattttggacttatattcgcgtctagtagatatgcttttatttttggaatgatctcaattagaatagtctctttagagtccatttaaagttacaaacaactaggaaattggtttatgatgtataatttttttagtttttatagattctttattctatacttaaaaaatgaaaataaatacaaaggttcttgagggttgtgttaaattgaaagcgagaaataatcataaattatttcattatcgcgatatccgttaagtttgtatcgtaatggcgtggtcaattacgaataaagcggatactagtagcttcacaaagatggctgaaatcagagctcatctaaaaaatagcgctgaaaataaagataaaaacgaggatattttcccggaagatgtaataattccatctactaagcccaaaaccaaacgagccactactcctcgtaaaccagcggctactaaaagatcaaccaaaaaggaggaagtggaagaagaagtagttatagaggaatatcatcaaacaactgaaaaaaattctccatctcctggagtcagcgacattgtagaaagcgtggccgctgtagagctcgatgatagcgacggggatgatgaacctatggtacaagttgaagctggtaaagtaaatcatagtgctagaagcgatctctctgacctaaaggtggctaccgacaatatcgttaaagatcttaagaaaattattactagaatctctgcagtatcgacggttctagaggatgttcaagcagctggtatctctagacaatttacttctatgactaaagctattacaacactatctgatctagtcaccgagggaaaatctaaagttgttcgtaaaaaagttaaaacttgtaagaagtaaatgcgtgcacttttttataaagatggtaaactctttaccgataataattttttaaatcctgtatcagacgataatccagcgtatgaggttttgcaacatgttaaaattcctactcatttaacagatgtagtagtatatgaacaaacgtgggaggaggcgttaactagattaatttttgtgggaagcgattcaaaaggacgtagacaatacttttacggaaaaatgcatgtacagaatcgcaacgctaaaagagatcgtatttttgttagagtatataacgttatgaaacgaattaattgttttataaacaaaaatataaagaaatcgtccacagattccaattatcagttggcggtttttatgttaatggaaactatgttttttattagatttggtaaaatgaaatatcttaaggagaatgaaacagtagggttattaacactaaaaaataaacacatagaaataagtcccgatgaaatagttatcaagtttgtaggaaaggacaaagtttcacatgaatttgttgttcataagtctaatagactatataaaccgctattgaaactgacggatgattctagtcccgaagaatttctgttcaacaaactaagtgaacgaaaggtatatgaatgtatcaaacagtttggtattagaatcaaggatctccgaacgtatggagtcaattatacgtttttatataatttttggacaaatgtaaagtccatatctcctcttccatcaccaaaaaagttaatagcattaactatcaaacaaactgctgaagtggtaggtcatactccatcaatttcaaaaagagcttatatggcaacgactattttagaaatggtaaaggataaaaattttttagatgtagtatctaaaactacgttcgatgaattcctatctatagtcgtagatcacgttaaatcatctacggatggatgatatagatctttacacaaataattacaagaccgataaatggaaatggataagcgtatgaaatctctcgcaatgacagctttcttcggagagctaagcacattagatattatggcattgataatgtctatatttaaacgccatccaaacaataccattttttcagtggataaggatggtcagtttatgattgatttcgaatacgataattataaggcttctcaatatttggatctgaccctcactccgatatctggagatgaatgcaagactcacgcatcgagtatagccgaacaattggcgtgtgtggatattattaaagaggatattagcgaatatatcaaaactactccccgtcttaaacgatttataaaaaaataccgcaatagatcagatactcgcatcagtcgagatacagaaaagcttaaaatagctctagctaaaggcatagattacgaatatataaaagacgcttgttaataagtaaatgaaaaaaaactagtcgtttataataaaacacgatatggatgccaacgtagtatcatcttctactattgcgacgtatatagacgctttagcgaagaatgcttcagaattagaacagaggtctaccgcatacgaaataaataatgaattggaactagtatttattaagccgccattgattactttgacaaatgtagtgaatatctctacgattcaggaatcgtttattcgatttaccgttactaataaggaaggtgttaaaattagaactaagattccattatctaaggtacatggtctagatgtaaaaaatgtacagttagtagatgctatagataacatagtttgggaaaagaaatcattagtgacggaaaatcgtcttcacaaagaatgcttgttgagactatcgacagaggaacgtcatatatttttggattacaagaaatatggatcctctatccgactagaattagtcaatcttattcaagcaaaaacaaaaaactttacgatagactttaagctaaaatattttctaggatccggtgcccaatctaaaagttctttgttgcacgctattaatcatccaaagtcaaggcctaatacatctctggaaatagaattcacacctagagacaatgaaacagttccatatgatgaactaataaaggaattgacgactctctcgcgtcatatatttatggcttctccagagaatgtaattctttctccgcctattaacgcgcctataaaaacctttatgttgcctaaacaagatatagtaggtttggatctggaaaatctatatgccgtaactaagactgacggcattcctataactatcagagttacatcaaacgggttgtattgttattttacacatcttggttatattattagatatcctgttaagagaataatagattccgaagtagtagtctttggtgaggcagttaaggataagaactggaccgtatatctcattaagctaatagagcctgtgaatgcaatcaatgatagactagaagaaagtaagtatgttgaatctaaactagtggatatttgtgatcggatagtattcaagtcaaagaaatacgaaggtccgtttactacaactagtgaagtcgtcgatatgttatctacatatttaccaaagcaaccagaaggtgttattctgttctattcaaagggacctaaatctaacattgattttaaaattaaaaaggaaaatactatagaccaaactgcaaatgtagtatttaggtacatgtccagtgaaccaattatctttggagaatcgtctatctttgtagagtataagaaatttagcaacgataaaggctttcctaaagaatatggttctggtaagattgtgttatataacggcgttaattatctaaataatatctattgtttggaatatattaatacacataatgaagtgggtattaagtccgtggttgtacctattaagtttatagcagaattcttagttaatggagaaatacttaaacctagaattgataaaaccatgaaatatattaactcagaagattattatggaaatcaacataatatcatagtcgaacatttaagagatcaaagcatcaaaataggagatatctttaacgaggataaactatcggatgtgggacatcaatacgccaataatgataaatttagattaaatccagaagttagttattttacgaataaacgaactagaggaccgttgggaattttatcaaactacgtcaagactcttcttatttctatgtattgttccaaaacatttttagacgattccaacaaacgaaaggtattggcgattgattttggaaacggtgctgacctggaaaaatacttttatggagagattgcgttattggtagcgacggatccggatgctgatgctatagctagaggaaatgaaagatacaacaaattaaactctggaattaaaaccaagtactacaaatttgactacattcaggaaactattcgatccgatacatttgtctctagtgtcagagaagtattctattttggaaagtttaatatcatcgactggcagtttgctatccattattcttttcatccgagacattatgctaccgtcatgaataacttatccgaactaactgcttctggaggcaaggtattaatcactaccatggacggagacaaattatcaaaattaacagataaaaagacttttataattcataagaatttacctagtagcgaaaactatatgtctgtagaaaaaatagctgatgatagaatagtggtatataatccatcaacaatgtctactccaatgactgaatacattatcaaaaagaacgatatagtcagagtgtttaacgaatacggatttgttcttgtagataacgttgatttcgctacaattatagaacgaagtaaaaagtttattaatggcgcatctacaatggaagatagaccgtctacaaaaaactttttcgaactaaatagaggagccattaaatgtgaaggtttagatgtcgaagacttacttagttactatgttgtttatgtcttttctaagcggtaaataataatatggtatgggttctgatatccccgttctaaatgcattaaataattccaatagagcgatttttgttcctataggaccttccaactgtggatactctgtattgttaatagatatattaatacttttgtcgggtaacagaggttctacgtcttctaaaaataaaagttttataacatctggcctgttcataaataaaaacttggcgattctatatatactcttattatcaaatctagccattgtcttatagatgtgagctactgtaggtgtaccatttgattttctttctaatactatatatttctctcgaagaagttcttgcacatcatctgggaataaaatactactgttgagtaaatcagttattttttttatatcgatattgatggacatttttatagttaaggataataagtatcccaaagtcgataacgacgataacgaagtatttatacttttaggaaatcacaatgactttatcagattaaaattaacaaaattaaaggagcatgtatttttttctgaatatattgtgactccagatacatatggatctttatgcgtcgaattaaatgggtctagttttcagcacggtggtagatatatagaggtggaggaatttatagatgctggaagacaagttagatggtgttctacatccaatcatatatctaaagatatacccgaagatatgcacactgataaatttgtcatttatgatatatacacttttgacgctttcaagaataaacgattggtattcgtacaggtacctccgtcgttaggagatgatagtcatttgactaatccgttattgtctccgtattatcgtaattcagtagccagacaaatggtcaataatatgatttttaatcaagattcatttttaaaatatttattagaacatctgattagaagccactatagagtttctaaacatataacaatagttagatacaaggataccgaagaattaaatctaacgagaatatgttataatagagataagtttaaggcgtttgtattcgcttggtttaacggcgtttcggaaaatgaaaaggtactagatacgtataaaaaggtatctaatttgatataatgaattcagtgactgtatcacacgcgccatatactattacttatcacgatgattgggaaccagtaatgagtcaattggtagagttttataacgaagtagccagttggctgctacgagacgagacgtcgcctattcctgataagttctttatacagttgaaacaaccgcttagaaataaacgagtatgtgtgtgcggtatagatccgtatccgaaagatggaactggtgtaccgttcgaatcaccaaattttacaaaaaaatcaattaaggagatagcttcatctatatctagattaaccggagtaattgattataaaggttataaccttaatataatagacggggttataccctggaattattacttaagttgtaaattaggagaaacaaaaagtcacgcgatctactgggataagatttccaagttactgctgcagcatataactaaacacgttagtgttctttattgtttgggtaaaacagatttctcgaatatacgggcaaagttagaatccccggtaactaccatagtcggatatcatccagcggctagagaccgccaattcgagaaagatagatcatttgaaattatcaacgttttactggaattagacaacaaggcacctataaattgggctcaagggtttatttattaatgctttagtgaaattttaacttgtgttctaaatggatgcggctattagaggtaatgatgttatctttgttcttaagactataggtgtcccgtcagcgtgcagacaaaatgaagatccaagatttgtagaagcatttaaatgcgacgagttagaaagatatattgagaataatccagaatgtacactattcgaaagtcttagggatgaggaagcatactctatagtcagaattttcatggatgtagatttagacgcgtgtctagacgaaatagattatttaacggctattcaagattttattatcgaggtgtcaaactgtgtagctagattcgcgtttacagaatgcggtgccattcatgaaaatgtaataaaatccatgagatctaatttttcattgactaagtctacaaatagagataaaacaagttttcatattatctttttagacacgtataccactatggatacattgatagctatgaaacgaacactattagaattaagtagatcatctgaaaatccactaaccagatcgatagacactgccgtatataggagaaaaacaactcttcgggttgtaggtactaggaaaaatccaaattgcgacactattcatgtaatgcaaccaccgcatgataatatagaagattacctattcacttacgtggatatgaacaacaatagttattacttttctctacaacaacgattggaggatttagttcctgataagttatgggaaccagggtttatttcattcgaagacgctataaaaagagtttcaaaaatattcattaattctataataaactttaatgatctcgatgaaaataattttacaacggtaccactggtcatagattacgtaacaccttgtgcattatgtaaaaaacgatcgcataaacatccgcatcaactatcgttggaaaatggtgctattagaatttacaaaactggtaatccacatagttgtaaagttaaaattgttccgttggatggtaataaactgtttaatattgcacaaagaattttagacactaactctgttttattaaccgaacgaggagaccatatagtttggattaataattcatggaaatttaacagcgaagaacccttgataacaaaactaattttgtcaataagacatcaactacctaaggaatattcaagcgaattactctgtccgaggaaacgaaagactgtagaagctaacatacgagacatgttagtagattcagtggagaccgatacctatccggataaacttccgtttaaaaatggtgtattggacctggtagacggaatgttttactctggagatgatgctaaaaaatatacgtgtactgtatcaaccggatttaaatttgacgatacaaagttcgtcgaagacagtccagaaatggaagagttaatgaatatcattaacgatatccaaccattaacggatgaaaataagaaaaatagagagctatatgaaaaaacattatctagttgtttatgcggtgctaccaaaggatgtttaacattcttttttggagaaactgcaactggaaagtcgacaaccaaacgtttgttaaagtctgctatcggtgacctgtttgttgagacgggtcaaacaattttaacagatgtattggataaaggacctaatccatttatcgctaacatgcatttgaaaagatctgtattctgtagcgaactacctgattttgcatgtagtgggtcaaagaaaatcagatctgataatattaaaaagttgacagaaccttgtgtcattggaagaccgtgtttctccaataaaattaataatagaaaccatgcgacaatcattatcgatactaattacaaacctgtttttgataggatagataacgcattaatgagaagaattgccgtcgtgcgattcagaacacacttttctcaaccttctggtagagaggctgctgaaaataatgacgcgtacgataaagtcaaactattagacgaggggttagatggtaaaatacaaaataatagatatagattcgcatttctatacttgttggtgaaatggtacagaaaatatcatgttcctattatgaaactatatcctacacccgaagagattcctgactttgcattctatctcaaaataggtactctgttagtatctagctctgtaaagcatattccattaatgacggacctctccaaaaagggatatatattgtacgataatgtggttactcttccgttgactactttccaacagaaaatatccaagtattttaattctagactatttggacacgatatagagagcttcatcaatagacataagaaatttgccaatgttagtgatgaatatctgcaatatatattcatagaggatatttcatctccgtaaatatatgctcatatatttatagaagatatcacatatctaaatgaataccggaatcatagatttatttgataatcatgttgatagtataccaactatattacctcatcagttagctactctagattatctagttagaactatcatagatgagaacagaagcgtgttattgttccatattatgggatcaggtaaaacaataatcgctttgttgttcgccttggtagcttccagatttaaaaaggtttacattctagtgccgaacatcaacatcttaaaaattttcaattataatatgggtgtagctatgaacttgtttaatgacgaattcatagctgagaatatctttattcattccacaacaagtttttattctcttaattataacgataacgtcattaattataacggattatctcgctacaataactctatttttatcgttgatgaggcacataatatctttgggaataatactggagaacttatgaccgtgataaaaaataaaaacaagattccttttttactattgtctggatctcccattactaacacacctaatactctgggtcatattatagatttaatgtccgaagagacgatagattttggtgaaattattagtcgtggtaagaaagtaattcagacacttcttaacgaacgcggtgtgaatgtacttaaggatttgcttaaaggaagaatatcatattacgaaatgcctgataaagatctaccaacgataagatatcacggacgtaagtttctagatactagagtagtatattgtcacatgtctaaacttcaagagagagattatatgattactagacgacagctatgttatcatgaaatgtttgataaaaatatgtataacgtgtcaatggcagtattgggacaacttaatctgatgaataatttagatactttatttcaggaacaggataaggaattgtacccaaatctgaaaataaataatggcgtgttatacggagaagaattggtaacgttaaacattagttccaaatttaaatactttattaatcggatacagacactcaacggaaaacattttatatacttttctaattctacatatggcggattggtaattaaatatatcatgctcagtaatggatattctgaatataatggttctcagggaactaatccacatatgataaacggcaaaccaaaaacatttgctatcgttactagtaaaatgaaatcgtctttagaggatctattagatgtgtataattctcctgaaaacgatgatggtagtcaattgatgtttttgttttcatcaaacattatgtccgaatcctatactctaaaagaggtaaggcatatttggtttatgactatcccagatactttttctcaatacaaccaaattcttggacgatctattagaaaattctcttacgccgatatttctgaaccagttaatgtatatcttttagccgccgtatattccgatttcaatgacgaagtgacgtcattaaacgattacacacaggatgaattaattaatgttttaccatttgacatcaaaaagctgttgtatctaaaatttaagacgaaagaaacgaatagaatatactctattcttcaagagatgtctgaaacgtattctcttccaccacatccatcaattgtaaaagttttattgggagaattggtcagacaatttttttataataattctcgtattaagtataacgataccaagttacttaaaatggttacatcagttataaaaaataaagaagacgctaggaattacatagatgatattgtaaacggtcacttctttgtatcgaataaagtatttgataaatctcttttatacaaatacgaaaacgatattattacagtaccgtttagactttcctacgaaccatttgtttggggagttaactttcgtaaagaatataacgtggtatcttctccataaaactgatgagatatataaagaaataaatgtcgagctttgttaccaatggatacctttccgttacattggaaccacacgagctgacgttagacataaaaactaatattaggaatgccgtatataagacgtatctccatagagaaattagtggtaaaatggccaagaaaatagaaattcgtgaagacgtggaattacctctcggcgaaatagttaataattctgtagttataaacgttccgtgtgtaataacctacgcgtattatcacgttggggatatagtcagaggaacattaaacatcgaagatgaatcaaatgtaactattcaatgtggagatttaatctgtaaactaagtagagattcgggtactgtatcatttagcgattcaaagtactgcttttttcgaaatggtaatgcgtatgacaatggcagcgaagtcactgccgttctaatggaggctcaacaaggtatcgaatctagttttgtttttctcgcgaatatcgtcgactcataaaaaagagaatagcggtaagtataaacacgaatactatggcaataattgcgaatgttttattctcttcgatatatttttgataatatgaaaaacatgtctctctcaaatcggacaaccatctcataaaatagttctcgcgcgctggagaggtagttgccgctcgtataatctctccagaataatatacttgcgtgtcgtcgttcaatttatacggatttctatagttctctgttatataatgcggtttgccctcatgattagacgacgacaatagtgttctaaatttagatagttgatcagaatgaatgtttattggcgttggaaaaattatccatacagcgtctgcagagtggttgatagttgttcctagatatgtaaaataatccaacttactaggcagcaaattgtctagataaaatactgaatcaaacggtgcagacgtattggcggatctaatggaatccaattgattaactatcttttgaaaatatacatttttatgatccaatacttgtaagaatatagaaataatgataagtccatcatcgtgtttttttgcctcttcataagaactatattttttcttattccaatgaacaagattaatctctccagagtatttgtacacatctatcaagtgattggatccataatcgtcttcctttccccaatatatatgtagtgatgataacacatattcattggggagaaaccctccacttatatatcctcctttaaaattaatccttactagttttccagtgttctggatagtggttggtttcgactcattataatgtatgtctaacggcttcaatcgcgcgttagaaattgcttttttagtttctatattaataggagatagttgttgcggcatagtaaaaatgaaatgataactgtttaaaaatagctcttagtatgggaattacaatggatgaggaagtgatatttgaaactcctagagaattaatatctattaaacgaataaaagatattccaagatcaaaagacacgcatgtgtttgctgcgtgtataacaagtgacggatatccgttaataggagctagaagaacttcattcgcgttccaggcgatattatctcaacaaaattcagattctatctttagagtatccactaaactattacggtttatgtactacaatgaactaagagaaatctttagacggttgagaaaaggttctatcaacaatatcgatcctcactttgaagagttaatattattgggtggtaaactagataaaaaggaatctattaaagattgtttaagaagagaattaaaagaggaaagtgatgaacgtataacagtaaaagaatttggaaatgtaattctaaaacttacaacacgggataaattatttaataaagtatatataagttattgcatggcgtgttttattaatcaatcgttggaggatttatcgcatactagtatttacaatgtagaaattagaaagattaaatcattaaatgattgtattaacgacgataaatacgaatatctgtcttatatttataatatgctagttaatagtaaatgaacttttacagatctagtataattagtcagattattaagtataatagacgactagctaagtctattatttgcgaggatgactctcaaattattacactcacggcattcgttaaccaatgcctatggtgtcataaacgagtatccgtgtccgctattttattaactactgataacaaaatattagtatgtaacagacgagatagttttctctattctgaaataattagaactagaaacatgtttagaaagaaacgattatttctgaattattccaattatttgaacaaacaggaaagaagtatactatcgtcatttttttctctagatccagctactactgataatgatagaatagatgctatttatccgggtggcatacccaaaaggggtgagaatgttccagagtgtttatccagggaaattaaagaagaagttaatatagacaattcttttgtattcatagacactcggttttttattcatggcatcatagaagataccattattaataaattttttgaggtaatcttctttgtcggaagaatatctctaacgagtgatcaaatcattgatacatttaaaagtaatcatgaaatcaaggatctaatatttttagatccgaattcaggtaatggactccaatacgaaattgcaaaatatgctctagatactgcaaaacttaaatgttacggccatagaggatgttattatgaatcattaaaaaaattaactgaggatgattgattagaaaatataaattaatttaccatcgtgtatttttataacgggattgtccggcatatcatgtagatagttaccgtctacatcgtatactcgaccatctacgcctttaaatcctctatttattgacattaatctattagaattggaataccaaatattagtaccctcaattagtttattggtaatattttttttagacgatagatcgatggctcttgaaaccaaggttttccaaccggactcattgtcgatcggtgagaagtctttttcattagcatgaatccattctaatgatgtatgtttaaacactctaaacaattggacaaattcttttgatttgctttgaatgatttcaaataggtcttcgtctacagtaggcataccattagataatctagccattataaagtgcacgtttacatatctacgttctggaggagtaagaacgtgactattgagacgaatggctcttcctactatctgacgaagagacgcctcgttccatgtcatatctaaaatgaagatatcattaattgagaaaaaactaataccctcgcctccactagaagagaatacgcatgttttaatgcattctccgttagtgtttgattcttggttaaactcagccaccgccttgattctagtatcttttgttctagatgagaactctatattagagataccaaagactttgaaatatagtaataagatttctattcctgactgattaacaaatggttcaaagactagacatttaccatgggatgctaatattcccaaacatacatctataaatttgacgcttttctcttttaattcagtaaatagagagatatcagccgcactagcatcccctttcaatagttctccctttttaaaggtatctaatgcggatttagaaaactctctatctcttaatgaatttttaaaatcattatatagtgttgctatctcttgcgcgtattcgcccggatcacgattttgtctttcaggaaagctatcgaacgtaaacgtagtagccatacgtctcagaattctaaatgatgatatacctgtttttatttcagcgagtttagccttttgataaatttcttcttgctttttcgacatattaacgtatcgcattaatactgttttcttagcgaatgatgcagacccttctacgtcatcaaaaatagaaaactcgttattaactatatacgaacatagtcctcctagtttggagactaattctttttcatcgactagacgtttattctcaaatagtgattggtgttgtaaggatcctggtcgtagtaagttaaccaacatggtgaattcttgcacactattgacgataggtgtagccgataaacaaatcatcttatggttttttaacgcaatggtcttagataaaaaattatatactgaacgagtaggacggatcttaccatcttctttgattaatgatttagaaatgaagttatgacattcatcaatgatgacgcatattctactcttggaattaatagttttgatattagtaaaaaatttatttctaaaattttgatcatcgtaattaataaaaatacaatccttcgttatctctggagcgtatctgagtatagtgttcatccaaggatcttctatcaaagcctttttcaccaataagataatagcccaattcgtataaatatccttaagatgtttgagaatatatacagtagtcattgttttaccgacacccgtttcatggaacaataaaagagaatgcatactgtctaatcctaagaaaactcttgctacaaaatgttgataatccttgaggcgtactacgtccgaccccatcatttcaacgggcatattagtagttctgcgtaaggcataatcgatataggccgcgtgtgatttactcatttatgagtgataagtaataactatgttttaaaaatcacagcagtagtttaactagtcttctctgatgtttgttttcgatactttttgaatcagaagtcatactagaataaagcaacgagtgaacgtaatagagagcttcgtatactctattcgaaaactctaagaacttattaatgaattccgtatccactggattgtttaaaatactaaattgaacactgttcacatccttccaagaagaagacttagtgacggacttaacatgagacataaataaatccaaattttttttacaaacatcactagccaccataatggcgctatctttcaaccagctatcgcttacgcattttagcagtctaacatttttaaagagactacaatatattctcatagtatcgattacacctctaccgaataaagttggaagtttaataatacaatatttttcgtttacaaaatcaaataatggtcgaaacacgtcgaaggttaacatcttataatcgctaatgtatagattgttttcagtgagatgattattagatttaatagcatctcgttcacgtttgaacagtttattgcgtgcgctgaggtcggcaactacggcgtccgctttagtactcctcccataatactttacgctattaatctttaaaatttcatagactttatctagatcgctttctggtaacatgatatcatgtgtaaaaagttttaacatgtcggtcggcattctatttagatcattaactctagaaatctgaagaaagtaattagctccgtattccagactaggtaatgggcttttacctagagacagattaagttctggcaatgtttcataaaatggaagaaggacatgcgttccctcccggatattttttacaatttcatccatttacaactctatagtttgttttcattattattagttattatctcccataatcttggtaatacttaccccttgatcgtaagataccttatacaggtcattacatacaactaccaattgtttttgtacataatagattggatggttgacatccatggtggaataaactactcgaacagatagtttatctttccccctagatacattagccgtaatagttgtcggcctaaagaatatctttggtgtaaagttaaaagttagggttcttgttccattattgctttttgtcagtagttcattataaattctcgagatgggtccgttctctgaatatagaacatcatttccaaatctaacttctagtctagaaataatatcggtcttattcttaaaatctattcccttgatgaagggatcgttaatgaacaaatccttggcctttgattcggctgatctattatctccgttatagacgttacgttgactagtccaaagacttacaggaatagatgtatcgatgatgttgatactatgtgatatgtgagcaaagattgttctcttagtggcatcactatatgttccagtaatggcggaaaactttttagaaatgttatatataaaagaattttttcgtgttccaaacattagcagattagtatgaagataaacactcatattatcaggaacattatcaatttttacatacacatcagcatcttgaatagaaacgataccatcttctggaacctctacgatctcggcagactccggataaccagtcggtgggccatcgctaacaataactagatcatccaacaatctactcacatatgcatctatataatctttttcatcttgtgagtaccctggatacgaaataaatttattatccgtatttccataataaggtttagtataaacagagagagatgttgccgcatgaacttcagttacagtcgccgttggttggtttatttgacctattactctcctaggtttctctataaacgatggtttaatttgtacattcttaaccatatatccaataaagctcaattcaggaacataaacaaattctttgttgaacgtttcaaagtcgaacgaagagtcacgaataacgatatcggatactggattgaaggttaccgttacggtaatttttgaatcggatagtttaagactgctgaatgtatcttccacatcaaacggagttttaatataaacgtatactgtagatggttctttaatagtgtcattaggagttaggccaatagaaatatcattaagttcactagaatatccagagtgtttcaaagcaattgtattattgatacaattattatataattcttcgccctcaatttcccaaataacaccgttacacgaagagatagatacgtgattaatacatttatatccaacatatggtacgtaactgaatcttcccatacctttaacttctggaagttccaaactcagaaccaaatgattaagcgcagtaatatactgatccctaatttcgaagctagcgatagcctgattgtctggaccatcgtttgtcataactccggatagagaaatatattgcggcatatataaagttggaatttgactatcgactgcgaagacattagaccgtttaatagagtcatccccaccgatcaaagaattaatgatagtattattcattttctatttaaaatggaaaaagcttacaataaactccgtagagaaatatctataatttgtgagttttccttaaagtaacagcttccgtaaacgccgtctttatctcttagtaggtttattgtatttatgaccttttccttatcttcatagaatactaaaggcaacaaagaaatttttggttcttctctaagagctacgtgagacttaaccatagaagccaacgaatccctacatattttagaacagaaataccctacttcaccacccttgtatgtctcaatactaataggtctaaaaaccaaatcttgattacaaaaccaacacttatcaattacactatttgtcttaatagacacatctgccatagatttataatactttggtagtatacaagcgagtgcttcttctttagcgggcttaaagactgctttaggtgctgaaataaccacatctggaaggcttactcgcttagccatttaattacggaactatttttttatacttctaatgagcaagtagaaaacctctcatctacaaaaacgtactcgtgtccataatcctctaccatagttacacgttttttagatctcatatgtgctaaaaagttttcccatactaattggttactattatttttcgtataatttttaacagtttgaggttttagatttttagttacagaagtgatatcgaatattttatccaaaaagaatgaataattaattgtcttagaaggagtgttttcttggcaaaagaataccaagtgcttaaatatttctactacttcattaatcttttctgtactcagattcagtttctcatcttttacttgattgattatttcaaagactaacttataatcctttttatttattctctcgttagccttaagaaaactagatacaaaatttgcatctacatcatccgtggatatttgatttttttccatgatatccaagagttccgagataatttctccagaacattgatgagacaataatctccgcaatacatttctcaaatgaataagtttattagacacgtggaagtttgactttttttgtacctttgtacatttttgaaataccgactcgcaaaaaatacaatattcatatccttgttcagatactataccgttatgtctacaaccgctacataatcgtagattcatgttaacactctacgtatctcgtcgtccaatattttatataaaaacattttatttctagacgttgccagaaaatcctgtaatatttttagttttttgggctgtgaataaagtatcgccctaatattgttaccgtcttccgccaatatagtagttaaattatccgcacatgcagaagaacaccgcttaggcggattcagtacaatgttatatttttcgtaccaactcatttaaatatcataatctaaaatagttctgtaatatgtctagcgctaatatattgatcataatcctgtgcataaattaagatacaacaatgtctcgaaatcatcgacatggcttcttccatagttagaagatcgtcgtcaaagttagcaacgtgattcatcaacatttgctgttttgaggcagcaaatactgaaccgtcgccattcaaccattcataaaaaccatcgtctgaatccattgataatttcttgtactggtttttgagagctcgcatcaatctagcatttctagctcccggattgaaaacagaaagaggatcgtacatccagggtccattttctgtaaatagaatcgtataatgtcccttcaagaagatatcagacgatccacaatcaaagaattggtctccgagtttgtaacaaactgcggactttaacctatacatgataccgtttagcataatttctggtgatacgtcaatcggagtatcatctattagagatctaaagccggtgtaacattctccaccaaacatattcttattctgacgtcgttctacataaaacatcattgctccattaacgataacaggggaatgaacagcactacccatcacattagttcccaatggatcaatgtgtgtaactccagaacatcttccatagcctatgttaggaggagcgaacaccactcttccactattgccatcgaatgccatagaataaatatccttggaattgatagaaatcggactgtcggatgttgtgatcatcttcataggattaacaactatgtatggtgccgcctgaagtttcatatcgtaactgatgccgtttataggtctagccacagaaaccaacgtaggtctaaatccaactatagacaaaatagaagccaatatctgttcctcatctgtcataacttgagagcatccagtatgaataatcttcattagatggggatctaccgcatcatcatcgttacaataaaaaattcccattctaatgttcataattgcttttctaatcatggtatgcatgtttgctctctgaatctctgtggaaattagatctgatacacctgtaatcactatcggattatcctccgtaagacgattaaccaacaacatataattataagactttacttttctaaattcataaagttgctggattaggctataggtgtctccatgtacatacgcgttctcgagcgcaggaagtttaataccgaatagtgccatcagaataggatgaatatagtaattagtttctggttttctataaataaaagacaaatcttgtgaactagacatatcggtaaaatgcatggattggaatcgtgtagtcgacagaagaatatgatgattagatggagagtatattttatctaactctttgagttggtcaccgattctaggactagctcgagaatgaataagtactaaaggatgagtacatttcacagaaacactagcattgttcaatgtgctctttacatgggtaaggagttgaaatagctcgtttctatttgttctgacaatatttagtttattcataatgttaagcatatcctgaatagtaaagttagatgtgtcatacttgttagtagttagatatttagcaattgcattcccatcatttctcaatctcgtactccaatcatgcgtggatgctacttcgtcgatggaaaccatacaatcctttttgataggctgttgagattgattatttcctgcacgtttaggtttggtacgttgatttctagcccctgcggatataaagtcatcgtctacaatttgggacaatgaattgcatacactacaagacaaagatttatcagaagtgtgaatatgatcttcatctaccaaagaaagagtttgattagtataactagattttagtcctgcgttagatgttaaaaaaacatcgctattgaccacggcttccattatttatattcgtagtttttactcgaaagcgtgattttaatatccaatcttattacttttggaatcgttcaaaacctttgactaattgtagaatttgatctattgccctacgcgtatactcccttgcatcatatacgttcgtcaccagatcgtttgtttcggcctgaagttggtgcatatctctttcaacattcgacatgagatccttaagggccatatcgtctagattttgttgagatgctgctcctggatttggattttgttgtgctgttgtacatactgtaccaccagtaggtgtaggagtacatacagtggccacaataggaggttgaggaggtgtaaccgttggagtagtacaagaaatatttccatccgattgttgtgtacatgtagttgttggtaacgtctgagaaggttgggtagatggcggtgtcgtcgtcttttgatctttattaaatttagagataatatcctgaacagcattgctcggcgtcaacgctggaaggagtgaactcgccggcgcatcagtatctgcagacagccaatcaaaaagattagacatatcagatgatgtattagtttgttgtcgtggttttggtgtaggagcagtactactaggtagaagaataggagccggtgtagctgttggaaccggctgtggagttatatgaatagttggttgtagcggttggataggctgtctgctggcggccatcatattatctctagctagttgttctcgcaactgtctttgataatacgactcttgagactttagtcctatttcaatcgcttcatcctttttcgtatccggatccttttcttcagaataatagattgacgactttggtgtagaggattctgccagcctctgtgagaacttgttaaagaagtccatttaaggctttaaaattgaattgcgattataagattaaatggcagacacagacgatattatcgactatgaatccgatgatctcaccgaatacgaggatgatgaagaagaggaagaagatggagagtcactagaaactagtgatatagatcccaaatcttcttataagattgtagaatcagcatccactcatatagaagatgcgcattccaatcttaaacatatagggaatcatatatctgctcttaaacgacgctatactagacgtataagtctatttgaaatagcgggtataatagcagaaagctataacttgcttcaacgaggaagattacctctagtttcagaattttctgacgaaacgatgaagcaaaatatgctacatgtaattatacaagagatagaggagggttcttgtcctatagtcatcgaaaagaacggagaattgttgtcggtaaacgattttgacaaagatggtctaaaattccatctagactatattatcaaaatttggaaacttcaaaaacgatattagaatttatacgaatatcgttctctaaatgtcacaatcaagtctcgcatgttcagcaatttattgtcgtactttatatcgtgttcattaacgatattttgcaaaatagtaatgattctatcttccttcgatagatattcttcagagattattgtcttatattctttcttgttatccgatatgaatttgataagactttgaacattattgatacccgtctgtttaattttttctacagatattttagttttggcagattctatcgtatctgtcaatagacatccaacatcgacattcgacgtcaattgtctataaatcaacgtataaattttagaaataacattagcgaattgttgtgcattgatgtcgttattctgaaacagtatgattttaggtagcattttcttaacaaagagaacgtatttattgttactcagttgaacagatgatatatccagattactaacgcatctgattccgtataccaaactttcagaagaaatggtatacaattgtttgtattcattcaatgtctctttttcagaaattagtttagagtcgaatactgcaataattttcaagagatagttttcatcagataagattttatttagtgtagatatgataaaactattgttttgttggagaacttgatacgccgcgttctctgtagtcgacgctctcaaatgggaaacaatctccattatttttttggaatcggatactatatcttcggtatcttgacgcagtctagtatacatagagttaagagagattagagtttgtacattaagcaacatgtctctaaatgtggctacaaacttttcctttttcacatcatctagtttattatataccgatttcacaacggcaccagatttaaggaaccagaatgaaaaactctgataactacaatatttcatcatagttacgattttatcatcttctatagttggtgtaatagcgcatacctttttctccaagactggaaccaacgtcataaaaatgtttaaatcaaaatccatatcaacatctgatgcgctaagaccagtctcgcgttcaagattatctttactaatggtgacgaactcatcgtataaaactctaagtttgtccattatttatttacagatttagttgtttaatttatttgtgctcttccagagttgggatagtatttttctaacgtcggtattatattattaggatctacgttcatatgtatcataatattaatcatccacgttttgataaatctatctttagcttctgaaataacgtatttaaacaaaggagaaaaatatttagctacggcatcagacgcaataacattttttgtaaatgtaacgtatttagacgacagatcttcgttaaaaagttttccatctatgtagaatccatcggttgttaacaccattcccgcgtcagattgaataggagtttgaatagtttgttttggaaatagatccttcaataacttatagttgggtgggaaaaaatcgattttatcactagactctttcttttttactatcattacctcatgaactatttcttgaatgagtatatgtattttctttcctatatcggacgcgttcattggaaaatataccatgtcgttaactataagaatatttttatcctcgtttacaaactgaataatatcagatgtagttcgtaaacgaactatatcatcaccagcacaacatctaactatatgatatccactagtttcctttagccgtttattatcttgttccatattagcagtcattccatcatttaagaaggcgtcaaagataatagggagaaatgacattttggattctgttacgactttaccaaaattaaggatatacggacttactatctttttctcaacgtcaatttgatgaacacacgatgaaaatgtgcttctatgagattgatcatgtagaaaacaacaagggatacaatatttccgcatatcatgaaatatattaagaaatcccaccttattatatttccccaaaggatccatgcacgtaaacattatgccgttatcattaataaagacttctttctcatcggatctgtaaaagttgttactgatttttttcattccaggatctagataattaataatgatgggttttctattcttattctttgtattttggcatatcctagaccagtaaacagtttccactttggtaaaatcagcagacttttgaacgctattaaacatggcattaatggcaataactaaaaatgtaaaatatttttctatgttaggaatatggtttttcactttaatagatatatggtttttggccaaaatgatagatatttttttatccgaggatagtaaaatattattagtcgccgtctctataaaaatgaagctagtctcgatatccaattttattctagaattgataggagtcgccaaatgtaccttatacgttatatctcccttgatgcgttccatttgtgtatctatatcggacacaagatctgtaaatagttttacgttattaatcatcacggtatcgccgtcgctagataacgctaatgtaccatccaagtcccaaatggagagatttaactgttcatcgtttagaataaaatgattaccggtcatattaataaagtgttcatcgtatctagataacaacgacttataattaatgtccaagtcttgaactcgctgaatgatcttttttaacccagttagttttagattggtacgaaatatattgttaaactttgattctacagtaatgtccaaatctagttgtggaaatacttccatcaacattgtttcaaacttgataatattattatctacatcttcgtacgatccaaattccggaatagatgtatcgcacgctctggccacccagataaccaaaaagtcacacgctccaggatatacattgtataaaaagctatcgttttttagtagggtttttttctgcgtgtatacgaagggattaaaaatagtattatcaacgtaactatattccaaattattcttatgagaatagataataatatcgtccttaatatctaacaaatttcctaaatatccctttaattgagtcattcgaagcgtcaatagaatatgtctcttaactatttccggctgttgtatatttaaatgacttcgtaaaaaataatatatgggcgacttctcatctatgtaatcatatggagtgagatatagggctcgttctacctcctgccccttacccacctgtaataccaattgcggacttactatatatcgcatatttatatcgtggggtaaagtgaaaatctactaccgatgatgtaagtcttacaatgttcgaaccagtaccagatcttaatttggaggcctccgtagaactaggggaggtaaatatagatcaaacaacacctatgataaaggagaatagcggttttatatcccgcagtagacgtctattcgcccatagatctaaggatgatgagagaaaactagcactacgattctttttacaaagactttattttttagatcatagagagattcattatttgttcagatgcgttgacgctgtaaaagacgtcactattaccaaaaaaaataacattatcgtggcgccttatatagcacttttaactatcgcatcaaaaggatgcaaacttacagaaacaatgattgaagcattctttccagaactatataatgaacatagtaagaaatttaaattcaactctcaagtatccatcatccaagaaaaactcggataccagtttggaaactatcacgtttatgattttgaaccgtattactctacagtagctctggctattcgagatgaacattcatctggcatttttaatatccgtcaagagagttatctggtaagttcattatctgaaataacatatagattttatctaattaatctaaaatctgatcttgttcaatggagtgctagtacgggcgctgtaattaatcaaatggtaaatactgtattgattacagtgtatgaaaagttacaactggtcatagaaaatgattcacaatttacatgttcattggctgtggaatcaaaacttccaataaaattacttaaagatagaaatgaattatttacaaaattcattaacgagttaaaaaagaccagttcattcaagataagcaaacgcgataaggatacgctactaaaatattttacttaggactggagttagaatttatagacgactcatttcgtttatcattgttactattattactattactatcattattagtgttggcattattagtattcttcttgtcatcttgttcagaaatatacagcaatgctatacctaatactaaatacattatcatgctcgcaatggctctaacaacaacgaaccaaaatgaatttggtcgtagcttttgttcacaaaaatacataaagaaatgtctacataaatctatggcgccattggctacttgaaatagcgccagtcctcctacagattttaatatagctgtataacatgacatttattcatcatcaaaagagacagagtcaccatctgtcatatttagattttttttcatgtgttcaaagtatcctctactcatttcattataatagtttatcatacttagaattttaggacggatcaatgagtaagacttgactagatcgtcagtagtaatttgtgcatcgtctattctgcatccgcttcgtcgaataatgtatagcatcgctttgagattctccatagctatcaagtctttatacaatgacatggaaatatctgtgaatactttatacttctccaacatcgatgccttaacatcatcgcctactttagcattgaaaatacgttctattgtgtagatggatgtagcaagatttttaaacaacaatgccatcttacacgatgattgcctcaagtctccaatcgtttgtttagaacgattagctacagagtccaatgcttggctgactagcatattattatctttagaaattgtattcttcaatgaggcgtttatcatatctgtgatttcgttagtcatattacagtctgactgggttgtaatgttatccaacatatcacctatggatacggtacacgtaccagcatttgtaataatcctatctaagatgttgtatggcattgcgcagaaaatatcttctcctgtaatatctccactctcgataaatctactcagattattcttaaatgccttattctctggagaaaagatatcagtgtccatcatttcattaatagtatacgcagaaaagataccacgagtatcaattctatccaagatacttatcggttccgagtcacagataatggtttcctctccttcgggagatcctgcatagaaatatctaggacaatagtttctatactgtctgtaactctgataatctctaaagtcactaactgataccatgaaattgagaagatcaaacgctgaagtaattaatttttctgcctcgtttttactacaactagttttcatcaatgtagtgacgatgtattgtttagttacttttggtctaatactgatgatagagatattattgcttcccataatggatcttctagtagtcaccttaaagcccattgatgcgaatagcagatagataaagtcttggtatgactcctttctaatatagtacggactacctttgtcacccaactttatacccacataagccataacaacctctttaatagccgtttcatgaggtttatcagccatgagcctgagtagttggaagaatctcatgaatcccgtctcagaaagtcctatatgcatgatagatttatctttcctgggaaactctcgtatagtcatagatgaaatactctttaaagtttctgaaataagattagtaacagtcttacctccgactactctaggtaacaaacaaactctaataggtgttttctctgcggagataatatcagaaaggatagagcaataagtagtattattgtgattataaagaccgaatacataacaggtagaatttataaacatcatgtcctgaaggtttttagacttgtattcctcgtaatccataccgtcccaaaacatggatttggtaactttgatagccgtagatctttgttccttcgccaacaggttaaagaaattaataaagaatttgttgtttctatttatgtccacaaattgcacgtttggaagcgccacggttacattcactgcagcattttgaggatcgcgagtatgaagtacgatgttattgtttactggtatatctggaaagaaatctaccagtctaggaataagagattgatatcgcatagaaatagtaaagtttataatctcatcatcgaagagcattttgttaccattgtaataaatatccactctgtcatatgtataaatgaagtactgttcaaacatgatgagatgtttatatgttggcatagtagtgagatcgacgtttggtaatggcaatgtattaagattaactccataatgtctagcagcatctgcgatgttataagcgtcgtcaaagcggggtcgatcttgtattgttatatattgtctaacacctataagattatcaaaatcttgtctgcttaatacaccgttaacaatttttgccttgaattcttttattggtgcattaataacatccttatagaggatgttaaacaaataagtgttatcaaagttaagatctggatatttcttttctgctagaacatccattgagtcggagccatctggtttaatataaccaccgataaatctagctctgtattctgtatccgtcaatctaatattaagaaggtgttgagtgaaaggtggaagatcgtaaaagctgtgagtattaatgataggattagtttccgaactaatgttaattggggtattaataatatctatatttccagcgttaagtgtaacattaaacagttttaattcacgtgacgtggtatcaattaaataattaatgcccaatttggatatagcagcctgaagctcatcttgtttagttacggatcctaatgagttattaagcaatatatcgaacggatgaacgaaggttgttttaagttggtcacatactttgtaatctagacatagatgcggaagaacggtagaaactatacgaaataaatattcagagtcctctaattgatcaagagtaactattgacttaataggcatcatttatttagtattaaatgacgaccgtaccagtgacggatatacaaaacgatttaattacagagttttcagaagataattatccatctaacaaaaattatgaaataactcttcgtcaaatgtctattctaactcacgttaacaacgtggtagatagagaacataatgccgccgtagtgtcatctccagaggaaatatcctcacaacttaatgaagatctatttccagatgatgattcaccggccactattatcgaacgagtacaacctcatactactattattgacgatactccacctcctacgtttcgtagagagttattaatatcggaacaacgtcaacaacgagaaaaaagatttaatattacagtatcgaaaaatgctgaagcaataatggaatctagatctatgataacttctataccaacacaaacaccatccttgggagtagtttatgataaagataaaagaattcagatgttagaggatgaagtggttaatcttagaaatcaacgatctaatacaaaatcatctgataatttagataattttaccaaaatactatttggtaagactccgtacaaatcaacagaagttaataagcgtatagccatcgttaattatgcaaatttgaacgggtcccccttatcagtcgaggacttggatgtttgttcggaggatgaaatagatagaatctataaaacgattaaacaatatcacgaaagtagaaaacgaaaaattatcgtcactaacgtgattattattgtcataaacattatcgagcaggcattgctaaaactcggatttgaagaaatcaaaggactgagtaccgatatcacttcagaaattatcgatgtggagatcggagatgactgcgatgctgtagcatctaaactaggaatcggtaacagtccggttcttaatattgtattgtttatactcaagatattcgttaaacgaattaaaattatttaatttaatacattcccatatccagacaacaatcgtctggattaatctgttcctgtcgtctcataccggacgacatattaatctttttattagtgggcatctttttagatggtttctttttcccagcattaactgagtcgatacctagaagatcgtgattgatctctccgaccattccacgaacttctaattggccgtctctgacggtaccataaactattttaccagcattagtaacagcttggacaatctgaccatccatcgcattgtacgatgtagtagtaactgttgttctacgtctaggagcaccagaagtatttttggagcccttggatgttgatgtagaagaagacgaggattttgattttggtttacatgtaatacattttgaactctttgattttgtatcacatgcgccggcagtcacatctgtttgagaattaagattattgttgcctcctttgacggctgcatctccaccgatttgcgctagtagatttttaagctgtggtgtaatcttattaactgtttcgatataatcatcgtaactgcttctaacggctaaattttttttatccgccatttagaagctaaaaatatttttatttatgcagaagatttaactagattatacaatgaactaatatgatccttttccagattatttacaaacttggtattttttggttctggaggaggcgaatttaaattcggacttggattcggattttgtaagttcttgatcttattatacatcgagtataggatggcgacagtaactgctacacaaataccgatcaaaagaagaataccaatcatttattgacaataacttcactattgatcaagtatgcaatatatcatcttttcactaaataagtagtaataatgattcaacaatgtcgagatatatggacgataataatttagttcatggaaatatcgctatgattggtgtgaatgactccgctaactctgtggggtgcgcagtgctttccccacatagaataaattagcattccgactgtgataataataccaagtataaacgccataatactcaatactttccatgtacgagtgggactggtagacttactaaagtcaataaaggcgaagatacacgaaagaatcaaaagaatgattccagcgattagcacgccggaaaaataatttccaatcataagcatcatgtccatttaactaataaaaattttaaatcgccgaatgaacaaagtggaatataaaccatataaaaacaatagtttgtactgcaaaaataatatctatttttgttttcgaagatatggtaaaattaaatagtagtacacagcatgttataactaacagcagcaacggctcgtaattacttatcatttactagacgaaaaggtggtgggatattttcttgctcaaataatacgaatatatcacccatccattttatgcgatgtttatatactctaatctttaatagatctatagacgacgggtttaccaacaatatagattttatcgattcatctaatttaaacccttccttaaacgtgaatgatctattatctggcataacgatgaccctacctgatgaatcggacaatgtactgggccatgtagaataaattatcaacgaattatcgtctacgaacatttatatcatttgttttaattttaggacgcgaataaatggatataaaatagaaaataacagatattacaaccagtgttatggccgcgcccaaccaggtaggcagttttattttatcttttactacaggttctcctggatgtacgtcaccaacggcggacgtagttctagtacaattagacgtaagttccgcttgggaattttttaacgctaaagagttaacgttaatcgtgcacccaacgtatttacatctagttcgttgaacatcttgattataatataaccattttctatctctagattcgtcagtgcactcatgtaaccaacataccctaggtcctaaatatttatctccggaattagattttggataattcgcgcaccaacaatttctatttcctttatgatcgttacaaaagacgtataatgccgtatccccaaaagtaaaataatcaggacgaataattctaataaactcagaacaatatctcgcatccatatgtttggagcaaatatcggaataagtagacatagccggtttccgttttgcacgtaaccattctaaacaattggggtttccaggatcgtttctacaaaatccagtcatgaaatcgtcacaatgttctgtcttgtaattattattaaatatttttggacagtgtttggtatttgtcttagaacaacattttgccacgctatcactatcgcccaggagataatccttttttataaaatgacatcgttgcccggatgctatataatcagtagcgtgttttaaatccttaatatattcaggagttacctcgttctgataatagattaatgatccaggacgaaatttgaaagaactacatggttctccatgaattaatacatattgtttagcaaattcaggaactataaaactactacaatgatctatcgacataccatctatcaaacaaaacttgggtttaatttctcccggagatgtttcataatagtacgtataactttcttctgcaaacttaacagctctattatattcaggataattaaaacctaattccatatatttgtctcgtatatctgctattcctggtgctattttgattctattaagagtaacagctgcccccattcttaataatcgtcagtatttaaactgttaaatgttggtatatcaacatctaccttatttcccgcagtataaggtttgttgcaggtatactgttcaggaatggttacatttatacttcttctatagtcctgtctttcgatgttcatcacatatgcaaagaacagaataaacaaaataatgtaagaaataatattaaatatctgtgaattcgtaaatacattgattgccataataattacagcagctacaatacatacaatagacattcccacagtgttgccattacctccacgatacatttgagttactaagcaataggtaataactaagctagtaagaggcaatagaaaagatgagataaatatcatcaatatagagattagaggagggctatatagagccaagacgaacaaaatcaaaccgagtaacgttctaacatcattatttttgaagattcccaaataatcattcattcctccataatcgttttgcatcatacctccatctttaggcataaacgattgctgctgttcctctgtaaataaatctttatcaagcactccagcacccgcagagaagtcgtcaagcatattgtaatatcttaaataactcatttatatattaaaaaatgtcactattaaagatggagtataatctttatgccgaactaaaaaaaatgacttgtggtcaacccctaagtctttttaacgaagacggggatttcgtagaagttgaaccgggatcatcctttaagtttctgatacctaagggattttacgcctctccttccgtaaagacgagtctagtattcgagacattaacaacgaccgataataaaatcactagtatcaatccaacaaatgcgccaaagttatatcctcttcaacgcaaagtcgtatctgaagtagtttctaatatgaggaaaatgatcgaatcaaaacgtcctctatacattactcttcacttggcgtgtggatttggtaagactattaccacgtgttatcttatggctacacacggtagaaaaaccgtcatttgcgtacccaataaaatgttaatacatcaatggaagacacaggtagaggcagtcggattggaacataagatatccatagatggagtaagtagtctattaaaggaactaaagactcaaagtccggatgtattaatagtagtcagtagacatctgacaaacgatgccttttgtaaatatatcaataagcattatgatttgttcatcttggatgaatcacatacgtataatctgatgaacaatacagcagttacaagatttttagcgtattatcctccgatgatgtgttattttttaactgctacacctagaccatctaaccgaatttattgtaacagtattattaatattgccaagttatccaatctaaaaaaaactatctatgcagtagatagtttttttgagccatattccacagataatattagacatatggtaaaacgactagatggaccatctaataaatatcatatatataccgagaagttattatctgtagacgagcctagaaatcaacttattcttgataccctggtagaagaattcaagtcaggaactattaatcgcattttagttattactaaactacgtgaacatatggtattattctacaaacgattattagattttttcggaccagaggttgtatttataggagacgcccaaaatagacgtactccagatatggtcaaatcaatcaaggaactaaatagatttatattcgtatccaccttattttattccggtactggtttagatattcctagtttggattcgttgttcatttgctcggcagtaatcaacaatatgcaaatagagcaattactagggagggtatgtcgagaaacagaactattagataggacggtatatgtatttcctaacacatccatcaaagaaataaagtacatgataggaaatttcatgcaacgaattattagtctgtctgtagataaactaggatttaaacaaaaaagttatcggaaacatcaagaatccgatcccacttctgcatgtacaacatcatccagagaagaacgtgtattaaatagaatatttaactcgcaaaatcgttaagaagtttaagcgacgatccgcatgctgcgcaggccagtgtattacccctcatagtattaatataatccaatgatacttttgtgatgtcggaaatcttaaccaatttagactgacaggcagaacacgtcatgcaatcatcatcgtcatcgataactgtagtcttgggcttctttttgcgactcttcattccggaacgcacattggtgctatccatttaggtagtaaaaaataagtcagaatatgccctataacacgatcgtgcaaaacctggtatatcgtctctatctttatcacaatatagtgtatcgacatttttattattattgacctcgtttatcttggaacatggaatgggaacatttttgttatcaacggccatctttgccttaattccagatgttgtaaaattataactaaacagtctatcatcgacacaaatgaaattcttgtttagacgtttgtagtttacgtatgcggctcgttcgcgtctcattttttcagatattgcaggtactataatattaaaaataagaatgaaataacataggattaaaaataaagttatcatgacttctagcgctgatttaactaacttaaaagaattacttagtctgtacaaaagtttgagattttcagattctgcggctatagaaaagtataattctttggtagaatggggaacatctacttactggaaaataggcgtgcaaaaggtagctaatgtcgagacgtcaatatctgattattatgatgaggtaaaaaataaaccgtttaatattgatccgggctattacattttcttaccggtatattttgggagcgtctttatttattcgaagggtaaaaatatggtagaacttggatctggaaactcttttcaaataccagatgatatgcgaagtgcgtgtaacaaagtattagacagcgataacggaatagactttctgagatttgttttgttaaacaatagatggataatggaagatgctatatcaaaatatcagtctccagttaatatatttaaactagctagtgagtacggattaaacatacccaaatatttagaaattgaaatagaggaagacacattatttgacgacgagttatactctattatagaacgctctttcgatgataaatttccaaaaatatccatatcgtatattaagttgggagaacttagacggcaagttgtagactttttcaaattctcattcatgtatattgagtccatcaaggtagatcgtataggagataatatttttattcctagcgttataacaaaatcaggaaaaaagatattagtaaaagatgtagaccatttaatacgatccaaggttagagaacatacatttgtaaaagtaaaaaagaaaaacacattttccattttatacgactatgatggaaacggaacagaaactagaggagaagtaataaaacgaattatagacactataggacgagactattatgttaacggaaagtatttctctaaggttggtagtgcaggcttaaagcaattgactaataaattagatattaatgagtgcgcaactgtcgatgagttagttgatgagattaataaatccggaactgtaaaacgaaaaataaaaaaccaatcagcatttgatttaagcagagaatgtttgggatatccagaagcggattttataacgttagttaataacatgcggttcaaaatagaaaattgtaaggttgtaaatttcaatattgaaaatactaattgtttaaataacccgagtattgaaactatatatggaaactttaaccagttcgtctcaatctttaatgtcgtcaccgatgtcaaaaaaagattattcgagtgaaataatatgcgcctttgatataggtgcaaaaaatcctgccagaactgttttagaagtcaaggataactccgttagggtattggatatatcaaaattagactggagttctgattgggaaaggcgcatagctaaagatttgtcacaatatgaatacactacagttcttctagaacgtcagcctagaaggtcgccgtatgttaaatttatctattttattaaaggctttttatatcatacatcggctgccaaagttatttgcgtctcgcctgtcatgtctggtaattcatatagagatcgaaaaaagagatcggtcgaagcatttcttgattggatggacacattcggattgcgagactccgttccggatagacgcaaattagacgatgtagcggatagtttcaatttggctatgagatacgtattagataaatggaatactaattatacaccttataataggtgtaaatctagaaattacataaaaaaaatgtaataacgttagtaacgccattatggataatctatttacctttctacatgaaatagaagatagatatgccagaactatttttaactttcatctaataagttgcgatgaaataggagatatatatggtcttatgaaagaacgcatttccttagaggatatgtttgataatatagtgtataataaagatatacatcctgccattaagaaactagtgtattgcgacatccaacttactaaacacattattaatcagaatacgtatccggtatttaacgattcttcacaagtgaaatgttgtcattatttcgacataaactcagataatagcaatattagctctcgtacagtagagatatttgagagggaaaagtcatctcttgtatcatatattaaaactaccaataagaagagaaaggtcaattacggcgaaataaagaaaactgttcatggaggcactaatgcaaattacttttccggtaaaaagtctgacgagtatctgagtactacagttagatccaacattaatcaaccttggatcaaaaccatctctaagaggatgagagttgatatcattaatcactctatagtaacgcgtggaaaaagctctatattacaaactatagaaattatttttactaatagaacatgtgtgaaaatattcaaggattctactatgcacattattctatccaaggacaaggatgaaaaggggtgtatacacatgattgacaaattattctatgtctattataatttatttctgttgttcgaagatatcatccaaaacgagtactttaaagaagtagctaatgttgtaaaccacgtactcacggctacggcattagatgagaaattattcctaattaagaaaatggctgaacacgatgtttatggagttagcaatttcaaaatagggatgtttaacctgacatttattaagtcgttggatcataccgttttcccctctctgttagatgaggatagcaaaataaagttttttaaggggaaaaagctcaatattgtagcattacgatctctggaggattgtataaattacgtgactaaatccgagaatatgatagaaatgatgaaggaaagatcgactattttaaatagcatagatatagaaacggaatcggtagatcgtctaaaagaattgcttctaaaatgaaaaaaaacactgattcagaaatggatcaacgactcggatataagtttttggtgcctgatcctaaagccggagttttttatagaccgttacatttccaatatgtatcgtattctaattttatattgcatcgattgcatgaaatcttgaccgtcaagcggccactcttatcgtttaagaataatacagaacgaattatgatagaaattagcaatgttaaagtgactcctccagattactcacctataatcgcgagtattaaaggtaagagttatgacgcattagccacgttcactgtaaatatctttaaagaggtaatgaccaaagagggtatatccatcactaaaataagtagttatgagggaaaagattctcatttgataaaaattccgctactaataggatacgggaataaaaatccacttgatacagccaagtatcttgttcctaatgtcataggtggagtctttatcaataaacaatctgtcgaaaaagtaggaattaatctagtagaaaagattacaacatggccaaaatttagggttgttaagccaaactcattcactttctcgttttcctccgtatcccctcctaatgtattaccgacaagatatcgccattacaagatatctctggatatatcacaattggaagcgttgaatatatcatcgacaaagacatttataacggtcaatattgttttgctgtctcaatatttatctagagtgagtctagaattcattagacgtagtttatcatacgatatgcctccagaagttgtctatctagtaaacgcgataatagatagtgctaaacgaattactgaatctattactgactttaatattgatacatacattaatgacctggtggaagctgaacacattaaacaaaaatctcagttaacgattaacgagttcaaatatgaaatgctgcataactttttacctcatatgaactatacacccgatcaactaaagggattttatatgatatctttactaagaaagtttctctactgtatcttccacacttctagatatccagatagagattcgatggtttgtcatcgcatcctaacgtacggcaaatattttgagacgttggcacatgatgaattagagaattacataggcaacatccgaaacgatatcatgaacaatcacaagaacagaggcacttacgcggtaaacattcatgtactaacaactcccggacttaatcacgcgttttctagcttattgagtggaaagttcaaaaagtcagacggtagttatcgaacacatcctcactattcatggatgcagaatatttctattcctaggagtgttggattttatccggatcaagtaaagatttcaaagatgttttctgtcagaaaataccatccaagtcaatatctttacttttgttcatcagacgttccggaaagaggtcctcaggtaggtttagtatctcaattgtctgtcttgagttccattacaaatatactaacgtctgagtatttggatttggaaaagaaaatttgtgagtatatcagatcatattataaagatgatataagttactttgaaacaggatttccaatcactatagaaaatgctctagtcgcatctcttaatccaaatatgatatgtgattttgtaactgactttagacgtagaaaacggatgggattcttcggtaacttggaggtaggtattactttagttagggatcacatgaatgaaattcgcattaatattggagcgggaagattagtcagaccattcttggttgtggataacggagagctcatgatggatgtgtgtccggagttagaaagcagattagacgacatgacattctctgacattcagaaagagtttccgcatgtcatcgaaatggtagatatagaacaatttacttttagtaacgtatgtgaatcggttcaaaaatttagaatgatgtcaaaggatgaaagaaagcaatacgatttatgtgactttcctgccgaatttagagatggatatgtagcatcttcactagtgggaatcaatcacaattctggacccagagctattcttggatgtgctcaagctaaacaagctatctcttgtctgagttcggatatacgaaataaaatagacaatggaattcatttgatgtatccagagaggccaatcgtgattagtaaggctttagaaacttcaaagattgcggctaattgcttcggccaacatgttactatagcattaatgtcgtacaaaggtatcaatcaagaggatggaattatcatcaaaaaacaatttattcagagaggcggtctcgatatagttaccgcaaagaaacatcaagtagaaattccattggaaaactttaataacaaagaaagagataggtctaacgcctattcaaaattagaaagtaatggattagttagactgaatgctttcttggaatccggagacgctatggcacgaaatatctcatcaagaactcttgaagatgattttgctagagataatcagattagcttcgatgtttccgagaaatataccgatatgtacaaatctcgcgttgaacgagtacaagtagaacttactgacaaagttaaggtacgagtattaaccatgaaagaaagaagacccattctaggagacaaatttaccactagaacgagtcaaaagggaacagtcgcgtatgtcgcggatgaaacggaacttccatacgacgaaaatggtatcacaccagatgtcattattaattctacatccatcttctctagaaaaactatatctatgttgatagaagttattttaacagccgcatattctgctaagccgtacaacaataagggagaaaaccgacctgtctgttttcctagtagtaacgaaacatccatcgatacatatatgcaattcgctaaacaatgttatgagcattcaaatccgaaattgtccgatgaagaattatcggataaaatcttttgtgaaaagattctctatgatcctgaaacggataagccttatgcatccaaagtattttttggaccaatttattacttgcgtctgaggcatttaactcaggacaaggcaaccgttagatgtagaggtaaaaagacgaagctcattagacaggcgaatgagggacgaaaacgtggaggaggtatcaagttcggagaaatggagagagactgtttaatagcgcatggtgcagccaatactattacagaagttttgaaagattcggaagaagattatcaagatgtgtatgtttgtgaaaattgtggagacatagcagcacaaatcaagggtattaatacatgtcttagatgttcaaaacttaatctctctcctctcttaacaaaaattgataccacgcacgtatctaaagtatttcttactcaaatgaacgccagaggcgtaaaagtcaaattagatttcgaacgaaggcctccttcgttttataaaccattagataaagttgatctcaagccgtcttttctggtgtaatattctagtttggtagtagatacatatcaatatcatcaaattcgagatccgaattataaaatgggcgtggattgttaactatagaatcggacgtctgatattcgaaaatctgtggagtttcaggttttggtggaggtgtaactgctacttgggatactgaagtctgatattcagaaagctgtggatgttctggttcggcatccaccgatggtgtcacatcactaatcggttcggtaacgtctgtggatggaggtgctacttctacagaacctgtagcctcagttgtcaacggagatacatttttaatgcgagaaaatgtataatttggtaatggtttcttatgtggatctgaagaagaggtaagatatctactagaaagataccgatcacgttctagttctcttttgtagaacttaactttttctttctccgcatctagttgatattccaacctcttcacgttactacgttcagattccaattcacgttcgcatgggttacctccgcagtttttacgagcgatttcacgttcagccttcatgcgtctctccctctctctatcgagtttatcagagcagtctttctgaaggcgatcgaactccataaatttctccaacgctttgattgtttccatagatttccgaagttcagcttttaggactgtgattctttttctttcgaattcacagctggatgtacaaccgtttccattaccgccatctctaagtttcttttctagatcggcaacatttcatccccatgccttttacattcctcgagtctactgtcgtcgaaatatcgttccagctccttttcgacatcaataactttagcacgttgtctctcaagctctcttttgtagttatctgattccctggcacgtttaagatcttcatgcaattgagtcagctcttaacttcctctcttgcttcttcgtcatagtacgcgcaatcactgtgagatccattgttaccacgtctacactcggcgagctcgcgtttaagagattcaatttcccgtttgtattggtccatgtttccattgctaccaccattagatttacaggctgctagttgtcgttcgagatcagaaatacgggttttcttggaattgatttcgtcgatgtacttggcatcgaaacacttattaagttctttttccaattctacgattttatttctttcgcgagtcaattccctcctgtagtaactatctgttttgtcagattcacgctctctacgtagactttcttgcaagttactaatttgttccctagcacgtccgagtttagttttatatgctgaatagagttctgattcatcctttgagcagatctctagcgatcgtttaagattcctaattctagtctttagcctatttacctcctcagaagatgttccgttaccgttgcgtttacactcgttaagctgtctatcaagatccatgattctatctctaagacgttgcatctctctttccatatcagcattgctttcattattacgtctgcagtcactcaactgtctttcaatatctgagattctatctctaagacgtcgcatctctctctgtttcggcattggtttcattattacgtctacagtcgttcaactgtctttcaagatctgatattctagattggagtctgctaatctctgtagcattttcacggcattcactcagttgtctttcaagatctgaaattttagattggagtctgctaatctctgtaagatttcctcctccgctctcgatgcagtcggtcaacttattctctagttctctaatacgcgaacgcagtgcatcaacttcttgcgtgtcttcctggttgcgtgtacattcatcgagtctagattcgagatctctaacgcgtcgtcgttcttcctcaagttctctgcgtactacagaaagcgtgtccctatcttgttgatatttagcaatttctgattctagagtactgattttgcttacgtagttactaatatttgtcttggccttatcaagatcctccttgtatttgtcgcattccttgatatccctacgaagtctggacagttcccattcgacattacgacgtttatcgatttcagctcggagatcgtcatcgcgttgttttagccacatacgactgagttcaagttctcgttgacaagatccatctacttttccattcctaatagtatccagttccttttctagttctgaacgcatttctcgttccctatcaagcgattctctcaattctcggatagtcttcttatcaatttctaataaatctgaaccatcatctgtcccattttgaatatccctgtgttctttgatctcttttgtaagtcggtcgattctttcggttttataaacagaatccctttccaaagtcctaatcttactgagtttatcactaagttctgcattcaattcggtgagttttctcttggcttcttccaactctgttttaaactctccactatttccgcattcttcctcgcatttatctaaccattcaattagtttattaataactagttggtaatcagcgattcctatagccgttcttgtaattgtgggaacataattaggatcttctaatggattgtatggcttgatagcatcatctttatcattattagggggatggacaaccttaattggttggtcctcatctcctccagtagcgtgtggttcttcaataccagtgttagtaataggcttaggcaaatgcttgtcgtacgcgggcacttcctcatccatcaagtatttataatcgggttctacttcagaatattcttttctaagagacgcgacttcgggagttagtagaagaactctgtttctgtatctatcaacgctggaatcaatactcaagttaaggatagcgaatacctcatcgtcatcatccgtatcttctgaaacaccatcatatgacatttcatgaagtctaacgtattgataaatagaatcagatttagtattaaacagatccttaacctttttagtaaacgcatatgtatattttagatctccagatttcataatatgatcacatgccttaaatgtcagtgcttccatgatataatctggaacactaatgggtgacgaaaaagatacagcaccatatgctacgttgataaataaatctgaaccactaagtagataatgattaatgttaagaaagaggaaatattcagtgtataggtatgtcttggcgtcatatcttgtactaaacacgctaaacagtttgttaatgtgatcaatttccaatagattaattagagcagcgggaataccaacaaacatattaccacatccgtattttctatgaatatcacatatcatgttaaaaaatcttgatagaagagcgaatatctcgtctgacttaatgagtcgtagttcagcagcaacataagtcataactgtaaatagaacatactttcctgtagtgttgattctagactccacatcaacaccattattaaaaatagttttatatacatctttaatctgctctccgttaatcgtcgaacgttctagtatacggaaacactttgatttcttatctgtagttaatgacttagtgatatcacgaagaatattacgaattacatttcttgtttttcttgagagacctgattcagaactcaactcatcgttccatagtttttctacctcagtggcgaaatctttggagtgcttggtacatttttcaataaggttcgtgacctccatttattataaaaaatttattcaaaacttaactacaatcgggtaattataaaatcgtagatctcccatgtggcggaatactaccatctatcgcatgtggatggacagtaggtaatggccatgggaacagtaatgtttgcatatttatctttcttgccagtattactgcatattgtcccaatgtttcgatgtgatgttctaacctatcaactgccgctgtatcacaacaatagtgtccgatgaaattaagattatgatccaatgtgtttaatatatgattatcaagtcttatacgatccgcgtcttttttgacaggatcaggttcttctacaggaagaagtttcggcctcttatgatattcatgtctgggaaacggtggtctagggtgaggctccggtatcggagtgggttttggattataatcatcatcgtctatgacatcatcttcgacttcgatatttattttgctatcttgatgatgtcctgtatcagttgcattttcagcactcgactgaatattagcgcattcattgtctattattaccatatttctaaacccaaaatgtatgtgttgaacatcagtactatcgttgatgagtcttatagcatgaattcgcttatcgttatcgggtttatcttctgtcaccttagcaattccttttttattaaactctacataatcatatccatttctattgtttgttctaatataaacgagtatagcatcattgctaaatttttcaatagtatcaaaaacagaatatcctaaaccatataatatatattcaggaacactcaaactaaatgtccaggattctcctaaatacgtaaactttaatagtgcgaaatcattcaaaaatctaccacttatagatagatagtacataaatgcgtatagtagtctacctatctctttattatgaaaaccggcattacgatcatatatgtcgtgatatacctgtgatccgtttacgttaaaccataaatacatgggtgatcctataaacatgaatttatttctaattctcagagctatagttaattgaccgtgtaatatttgcttacatgcatacttgatacgcttattaataagatttttatcattgctcgttatttcagaatcgtatatataaggagtaccatcgtgattcttaccagatattatacaaaatactatatataaaatatattgaccaacgttagtaatcatataaatgtttaacgttttaaattttgtattcaatgatccattatcatacgctagcatggtcttatgatattcattctttaaaatataatattgtgttagccattgcattggggctcctaatggagattttttattctcatccattttaggataggctttcataaagtccctaataacttcgtgaataatgtttctatgttttctactgatgcatgtatttgcttcgatttttttatcccatgtttcatctatcatagatttaaacgcagtaatgctcgcaacattaacatcttgaaccgttggtacaattccgttccataaatttataatgttcgccatttatataactcattttttgaatatacttttaattaacaaaagagttaagttactcatatggacgccgtccagtctgaacatcaatctttttagccagagatatcatagccgctcttagagtttcagcgtgattttccaacctaaatagaacttcatcgttgcgtttacaacacttttctatttgttcaaactttgttgttacattagtaatctttttttccaaattagttagccgttgtttgagagtttcctcattgtcgtctccatcggctttaacaattgcttcgcgtttagcctctggctttttagcagcctttgtagaaaaaaattcagttgctggaattgcaagatcgtcatctccggggaaaagagttccgtccatttaaagtacagattttagaaactgacactctgcgttatttatatttggtacaacacatggattataaatattgatgttaataacatcagaaaatgtaaagtctatacattgttgcatcgtgttaaattttctaatggatctagtattattgggtccaacttctgcctgaaatccaaatatggaagcggatacaaaaccgtttcctggataaaccacacatctccacttttgctttacatcagaaattgtgtcgttgacatcttgaactctcctatctaatgccggtgttccacctatagattttgaatattcgaatgctgcatgagtagcattaaattccttaatattgccataattttcatatattgagtaaccctggataaaaagtaaacacaccgcagccgtcgctaccacaataaaaaaaattgatagagagttcatttataatctattagaagctgacaaaatttttttacacgcatcagacaatgctttaataaatagttcaacatctacttttgtcatatcgaaccgatggtatgattctaacctagaattacatccgaaaaagttgactatgttcatagtcattaagtcattaacaaacaacattccagactctggattataagacgatactgtttcgtcacaattacctaccttaatcatgtgattatgaatattggctattagagcaccttctaagaaatctataatatctttgaaacacgatttaaaatcaaaccacgaatatacttctacgaagaaagttagtttacccataggagaaataactataaatggagatctaaatacaaaatccggatctatgatagttttaacattattatattctctattaaatacctccacatctaaaaatgttaattttgaaactatgtcttcgtttattaccgtacctgaactaaacgctataagctctattgtttgagaactctttaaacgatattcttgaaatacatgtaacaaagtttcctttaactcggtcggtttatctaccatagttacagaatttgtatccttatctataatataataatcaaaatcgtataaagttatataattatcgcgttcagattgggatcttttcaaatagactaaaaaccccatttctctagtaagtatcttatgtatatgtttgtaaaatatcttcatggtgggaatatgctctaccgcagttagccattcctcattgacagcggtagatgtattagacaaaactattccaatgtttaacaagggccattttacgagattattaaatccttgtttgataaatgtagccaatgagggttcgagttcaacgacgattgaattctcttcccgcggatgctgcatgatgaacgacgggatgttgttcgattgatttggaattctttttcgactttttgtttatattaaatattttaaaatttatagcggatagcaattcatgtaccacggataatgtagacgcgtattgcgcatcgatatctttattattagataaatttatcaataaatgtgagaagtttgcctcgttaaggtcttccatttaaatattatataaacatttgtgtttgtaacttattcgtcttttatggaatagttttttactagtaaagctgcaattacacactttgtccgtaaaacataaatataaacaccagcttttatcaatcgttccaaaaagtcgacggcggacatttttaacatggcatctattttaaatacacttaggtttttggaaaaaacatcattttataattgtaacgattcaataactaaagaaaagattaagattaaacataagggaatgtcatttgtattttataagccaaagcattctaccgttgttaaatacttgtctggaggaggtatatatcatgatgatttggttgtattggggaaggtaacaattaataatctaaagatgatgctattttacatggatttatcatatcatggagtgacaagtagtggagcaatttacaaattgggatcgtctatcgatagactttctctaaataggactattgttacaaaagttaataattatgatgatacattttttgacgacgatgattgatcgctattgcacaattttgtttttgtactttctaatatagtgtttaggttctttttcatatgagaatattgatttactaaaatatctatgtttaacttttgttctatgacgtccttatcggcggtatcggtacatatacgtaattcaccttcacaaaatacggagtcttcgataataatagccaatcgattattggatctagctgtctgtatcatattcaacatgtttaatatatcctttcgtttcccctttacaggcatcgatcgtagcatattttccgcgtctgatatggaaatgttaaaactacaaaaatgcgtaatgttagcccgtcctaatattggtacgtgtctataagtttggcatagtagaataatagacgtgtttaaatgccttccaaagtttaagaattctattagagtattgcattttgatagtttatcgcctacatcatcaaaaataagtaaaaagtgtgctgattttttatgattttgtgcgacagcaatacatttttctatgttacttttagttcgtatcagattatattctagagattcctgactactaacgaaattaatatgatttggccaaatgtatccatcataatctgggttataaacgggtgtaaacaagaatatatgtttatattttttaactagtgtagaaaacagagatagtaaatagatagtttttccagatccagatcctcctgttaaaaccattctaaacggcatttttaataaattttctcttgaaaattgtttttcttggaaacaattcataattatatttacagttactaaattaatttgataataaatcaaaatatggaaaactaaggttgttagtagggaggagaacaaagaaggcacatcgtgatataaataacatttattatcatgatgacaccagaaaacgacgaagagcagacatctgtgttctccgctactgtttacggagacaaaattcagggaaagaataaacgcaaacgcgtgattggtctatgtattagaatatctatggttatttcactactatctatgattaccatgtccgcgtttctcatagtgcgcctaaatcaatgcatgtctgctaacgaggctgctattactgacgccgctgttgccgttgctgctgcatcatctactcatagaaaggttgcgtctagcactacgcaatatgatcacaaagaaagctgtaatggtttatattaccagggttcttgttatatattacattcagactaccagttattctcggatgctaaagcaaattgcactgcggaatcatcaacactacccaataaatccgatgtcttgactacctggctcattgattatgttgaggatacatggggatctgatggtaatccaattacaaaaactacatccgattatcaagattctgatgtatcacaagaagttagaaagtatttttgtgttaaaacaatgaactaatatttatttttgtacattaataaatgaaatcgcttaatagacaaactgtaagtaggtttaagaagttgtcggtgccggccgctataatgatgatactctcaaccattattagtggcataggaacatttctgcattacaaagaagaactgatgcctagtgcttgcgccaatggatggatacaatacgataaacattgttatttagatactaacattaaaatgtctacagataatgcggtttatcagtgtcgtaaattacgagctagattgcctagacctgatactagacatctgagagtattgtttagtattttttataaagattattgggtaagtttaaaaaagaccaatgataaatggttagatattaataatgataaagatatagatattagtaaattaacaaattttaaacaactaaacagtacgacggatgctgaagcgtgttatatatacaagtctggaaaactggttaaaacagtatgtaaaagtactcaatctgtactatgtgttaaaaaattctacaagtgacaacaaaaaatgaattaataataagtcgttaacgtacgccgccatggacgccgcgtttgttattactccaatgggtgtgttgactataacagatacattgtatgatgatctcgatatctcaatcatggactttataggaccatacattataggtaacataaaaactgtccaaatagatgtacgggatataaaatattccgacatgcaaaaatgctactttagctataagggtaaaatagttcctcaggattctaatgatttggctagattcaacatttatagcatttgtgccgcatacagatcaaaaaataccatcatcatagcatgcgactatgatatcatgttagatatagaagataaacatcagccattttatctattcccatctattgatgtttttaacgctacaatcatagaagcgtataacctgtatacagctggagattatcatctaatcatcaatccttcagataatctgaaaatgaaattgtcgtttaattcttcattctgcatatcagacggcaatggatggatcataattgatgggaaatgcaatagtaattttttatcataaaagttgtaaagtaaataataaaacaataaatattgaactagtagtacgtatattgagcaatcagaaatgatgctggtacctcttatcacggtgaccgtagttgcgggaacaatattagtatgttatatattatatatttgtaggaaaaagatacgtactgtctataatgacaataaaattatcatgacaaaattaaaaaagataaagagttctaattccagcaaatctagtaaatcaactgatagcgaatcagactgggaggatcactgtagtgctatggaacaaaacaatgacgtagataatatttctaggaatgagatattggacgatgatagcttcgctggtagtttaatatgggataacgaatccaatgttatggcgcctagcacagaacacatttacgatagtgttgctggaagcacgctgctaataaataatgatcgtaatgaacagactatttatcagaacactacagtagtaattaatgaaacggagactgttgaagtacttaatgaagataccaaacagaatcctaactattcatccaatcctttcgtaaattataataaaaccagtatttgtagcaagtcaaatccgtttattacagaacttaacaataaatttagtgagaataatccgtttagacgagcacatagcgatgattatcttaataagcaagaacaagatcatgaacacgatgatatagaatcatcggtcgtatcattggtgtgattagtttcctttttataaaattgaagtaatatttagtattattgctgccgtcacgttgtacaaatggagatattccctgtattcggcatttctaaaattagcaattttattgctaataatgactgtagatattatatagatacagaacatcaaaaaattatatctgatgagatcaatagacagatggatgaaacggtacttcttaccaacatcttaagcgtagaagttgtaaatgacaatgagatgtaccatcttattcctcatagattatcgacgattatactctgtattagttctgtcggaggatgtgttatctctatagataatgacgtcaatggcaaaaatattctaacctttcccattgatcatgctgtaatcatatccccactgagtaaatgtgtcgtagttagcaagggtcctacaaccatattggttgttaaagcggatatacctagcaaacgattggtaacatcgtttacaaacgacatactatatgtaaacaatctgtcactgattaattatttgccgttgtctgtattcattattagacgagtcaccgactatttggatagacacatatgcgatcagatatttgctaataataagtggtattcccttataaccatcgacgataagcaatatcctattccatcaaactgtataggtatgtcctctgccaagtacataaattctagcatcgagcaagatactttaatccatgtttgtaacctcgagcatccgttcgactcagtatacaaaaaaatgcagtcgtacaattctctacctatcaaggaacaaatattgtacggtagaattgataatataaatatgagcattagtatttctgtggattaatagatttctagtatggggatcattaatcatctctaatctctaaatacctcataaaacgaaaaaaaagctattatcaaatactgtacggaatggattcattctcttctctttttatgaaactctgttgtatatctactgataaaactggaagcaaaaaatctgatagaaagaataagaataagatcaaggattatatggaacacgattattataaaataacaatagttcctggttcctcttccacgtctactagctcgtggtattatacacatgcctagtaatagtctctttgcgttgacggaaagcagactagaaataacaggctaaaatgttcagacaccataatagttcccaacccagataataacagagttccatcaacacattcctttaaactcaatcccaaacccaaaaccgttaaaatgtatccggccaattgatagtagataatgaggtgtacagcgcatgataatttacacagtaaccaaaatgaaaacactttagtaattataagaaatatagacggtaatgtcatcatcaacaatccgataatatgcctgagagtaaacattgatggataaaacaaaaatgctccgcataactctatcatggcaataacacaaccaaacacttgtaaaattcctaaattagtagaaaatacaacgaatatcgatgtataagtgatctcgagaaataataagaataaagtaatgcccgtaaagataaacatcaacattgtttggtaatcattaaaccaattagtatgaagttgaactaatttcacagtagattttattccagtgttatcctcgcatgtataagtacctggtaagatatctttatattccataatcaatgagacatcactatctgataacgaatgaagtctagcactagtatgccatttacttaatattgtcgtcttggaagttttattataagttaaaatatcatggttatccaatttccatctaatatactttgtcggattatctatagtacacggaataatgatggtatcattacatgctgtatactctatggtctttgtagttgttataacaaccaacgtatagaggtatatcaacgatattctaactcttgacattttttatttatttaaaatgatacctttgttatttattttattctattttgctaacggtattgaatggcataagtttgaaacgagtgaagaaataatttctacttacttattagacgacgtattatacacgggtgttaatggggcggtatacacattttcaaataataaactaaacaaaactggtttaactaataataattatataacaacatctataaaagtagaggatgcggataaggatacattagtatgcggaaccaataacggaaatcccaaatgttggaaaatagacggttcagacgacccaaaacatagaggtagaggatacgctccttatcaaaatagcaaagtaacgataatcagtcacaacggatgtgtactatctgacataaacatatcaaaagaaggaattaaacgatggagaagatttgacggaccatgtggttatgatttattcacggcggataacgtaattccaaaagatggtttacgaggagcattcgtcgataaagacggtacttatgacaaagtttacattcttttcactgatactatcggctcaaagagaattgtcaaaattccgtatatagcacaaatgtgcctaaacgacgaaggtggtccatcatcattgtctagtcatagatggtcgacgtttctcaaagtcgaattagaatgtgatatcgacggaagaagttatagacaaattattcattctagaactataaaaacagataatgatacgatactatatgtattcttcgatagtccttattccaagtccgcattatgtacctattctatgaataccattaaacaatctttttctacgtcaaaattggaaggatatacaaagcaattgccgtctccagctcctggtatatgtttaccagctggaaaagttgttccacataccacgtttgaagtcatagaacaatataatgtactagatgatattataaagcctttatctaaccaacctatcttcgaaggaccgtctggtgttaaatggttcgatataaaggagaaggaaaatgaacatcgggaatatagaatatacttcataaaagaaaattctatatattcgttcgatacaaaatctaaacaaactcgtagctcgcaagtcgatgcgcgactattttcagtaatggtaactgcgaaaccgttatttatagcagatatagggataggagtaggaatgccacaaatgaaaaaaatacttaaaatgtaatcttaatcgagtacaccacacgacaatgaacaaacataagacagattatgctggttatgcttgctgcgtaatatgcggtctaattgtcggaattatttttacagcgacactattaaaagttgtagaacgtaaattagttcatacaccattaatagataaaacgataaaagatgcatatattagagaagattgtcctactgactggataagctataataataaatgtatccatttatctactgatcgaaaaacctgggaggaaggacgtaatgcatgcaaagctctaaattcaaattcggatctaattaagatagagactccaaacgagttaagttttttaagaagccttagacgaggctattgggtaggagaatccgaaatattaaaccagacaaccccatataattttatagctaagaatgccacgaagaatggaactaaaaaacggaaatatatttgtagcacaacgaatactcccaaactgcattcgtgttacactatataacaattacactacatttttatcataccactacttcggttagatgttttagaaaaaaataaatatcgccgtaccgttcttgtttttataaaaataacaattaacaattatcaaattttttctttaatattttacgtggttgaccattcttggtggtaaaataatctcttagtgttggaatggaatgctgtttaatgtttccacactcatcgtatattttgacgtatgtagtcacatcgtttacgcaatagtcagactgtagttctatcatgcttcctacatcagaaggaggaacagttttaaagtctcttggttttaatctattaccgttagttttcatgaaatcctttgttttatccacttcacattttaaataaatgtccactatacattcttttgttaattttactagatcgtcatgggtcatagaatttataggttccgtagtccatggatccaaactagcaaacttcgcgtatacggtatcgcgattagtgtatacaccaactgtatgaaaattaagaaaacagtttaataaatcaacagaaatatttaatcctccgtttgatacagatgcgccatatttatggatttcggattcacacgttgtttgtctgaggtgttcgtctagtgttgcttctacgtaaacttcgattcccatatattctttattgtcagaatcgcataccgatttatcatcatacactgtttgaaaactaaatggtatacacatcaaaataataaataataacgagtacattctgcaatattgttatcgtaattggaaaaatagtgttcgagtgagttggattatgtgagtattggattgtatattttattttatattttgtaataagaataaaatgctaatgtcaagtttattccaatagatgtcttattaaaaacatatataataaataacaatggctgaatggcataaaattatcgaggatatctcaaaaaataataagttcgaggatgccgccatcgttgattacaagactacaaagaatgttctagctgctattcctaacagaacatttgccaagattaatccgggtgaaattattcctctcatcactaatcgtaatattctaaaacctcttattggtcagaaatattgtattgtatatactaactctctaatggatgagaacacgtatgctatggagttgcttactgggtacgcccctgtatctccgatcgttatagcgagaactcataccgcacttatatttttgatgggtaagccaacaacatccagacgtgacgtgtatagaacgtgtagagatcacgctacccgtgtacgtgcaactggtaattaaaataaaaagtaatattcatatgtagtgtcaattttaaatgatgatgatgaaatggataatatccatattgacgatgtcaataatgccggtattggcatacagttcatcgatttttagatttcattcagaggatgtggaattatgttatgggcatttgtattttgataggatctataatgtagtaaatataaaatataatccgcatattccatatagatataattttattaatcgcacgttaaccgtagatgaactagacgataatgtcttttttacacatggttattttttaaaacacaaatatggttcacttaatcctagtttgattgtctcattatcaggaaacttaaaatataatgatatacaatgctcagtaaatgtatcgtgtctcattaaaaatttggcaacgagtacatctactatattaacatctaaacataagacttattctctacatcggtccacgtgtattactataataggatacgattctattatatggtataaagatataaatgacaagtataatgacatctatgattttactgcaatatgtatgctaatagcgtctacattgatagtgaccatatacgtgtttaaaaaaataaaaatgaactcttaattatgctatgctattagaaatggataaaatcaaaattacggttgattcaaaaattggtaatgttgttaccatatcgtataacttggaaaagataactattgatgtcacacctaaaaagaaaaaagaaaaggatgtattattagcgcaatcagttgctgtcgaagaggcaaaagatgtcaaggtagaagaaaaaaatattatcgatattgaagatgacgatgatatggatgtagaaagcgcgtaatacgatctataaaaataagtatataaatactttttatttactgtactcttactgtgtagtggtgataccctactcgattatttttttaaaaaaaaaatacttattctgattcttctagccatttccgtgttcgtttgaatgccacatcgacgtcaaagataggggagtagttgaaatctagttctgcattgttggtacgcacctcaaatgtagtgttggatatcttcaacgtatagttgttgagtagtgatggttttctaaatagaattctcttcatatcattcttgcacgcgtacatttttagcatccatcttggaatcctagatccttgttctattcccaatggtttcatcaatagaagattaaacatatcgtacgaacacgatggagagtaatcgtagcaaaagtaagcatttcctttaatctcagatcccggatactggatatattttgcagccaacacgtgcatccatgcaacatttcctacatatacccggctatgcaccgcgtcatcatcgactgtacgatacataatgttaccgtgttgcttacattgctcgtaaaagactttcatcaatttgtctccttctccgtaaattccagtgggtcttaggcaacaagtatacaattttgctccattcatgattacggaattattggctttcataaccagttgctcggccatacgtttactttttgcgtatacatgtcctggtgatatatcataaagggtatgctcatggccgatgaatggatcaccgtgtttattgggtcctattgcttccatgctactagtatagatcaaatacttgattcctaggtccacacaagctgccaaaatagtctgtgttccataatagtttactttcatgatttcattatcggtgtattttccaaatacatccactagagcagccgtatgaataatcagatttaccccatctagcgcttctctcaccttatcaaagtcgtttatatcacattgtatatagtttataaccttaactttcgaggttattggttgtggatcttctacaatatctatgactctgatttcttgaacatcatctgcactaattaacagttttactatatacctgcctagaaatccggcaccaccagtaaccgcgtacacggccattgctgccactcataatatcagactacttattctattttactaaataatggctgtttgtataatagaccacgataatatcagaggagttatttactttgaaccagtccatggaaaagataaagttttaggatcagttattggattaaaatccggaacgtatagtttgataattcatcgttacggagatattagtcaaggatgtgattccataggcagtccagaaatatttatcggtaacatctttgtaaacagatatggtgtagcatatgtttatttagatacagatgtaaatatatttacaattattggaaaggcgttatctatttcaaaaaatgatcagagattagcgtgtggagttattggtatttcttacataaatgaaaagataatacattttcttacaattaacgagaatggcgtttgatatatcagttaatgcgtctaaaacaataaatgcattagtttacttttctactcagcaaaataaattagtcatacgtaatgaagttaatgatacacactacactgtcgaatttgatagggacaaagtagttgacacgtttatttcatataatagacataatgacaccatagaaataagaggggtgcttccagaggaaactaatattggttgcgcggttaatacgccggttagtatgacttacttgtataataagtatagttttaaactgattttagcagaatatataagacacagaaatactatatccggcaatatttattcggcattgatgacactagatgatttggctattaaacagtatggagacattgatctattatttaatgagaaacttaaagtagactccgattcgggactatttgactttgtcaactttgtaaaggatatgatatgttgtgattctagaatagtagtagctctatctagtctagtatctaaacattgggaattgacaaataaaaaatataggtgtatggcattagccgaacatatatctgatagtattccaatatctgagctatctagactacgatacaatctatgtaagtatctacgcgggcacactgagagcatagaggatgaatttgattattttgaagacgatgattcgtctacatgttctgccgtaaccgacagggaaacggatgtataatttttttttatagcgtgaaggatatgataaaaaatataattgttgtatttatcccattccaatcaccttatatgattctgtaacacaataaaggagtcttatagatgtatagaggtcagatactggtttgataaactgtttattccacataagtatgtttgactttatggttagacccgcatactttaacaaatcactgaaaattggagttaggtattgacctctcagaatcagttgccgttctggaacattaaatgtattttttatgatatactccaacgcatttatgtgggcatacaacaagtcattactaatggagtattccaagagttttagttgtctagtatttaacaagagaagagatttcaacagactgtttatgaactcgaatgccgcctcattgtcgcttatattgatgatgtcgaattctcccaatatcatcaccgatgagtagctcatcttgttatcgggatccaagttttctaaagatgtcattaaaccctcgatcatgaatggatttatcatcatcgtttttatgttggacatgagcttagtccgtttgtccacatctatagacgacgatttctgaattatttcatatatccctctctttaactccaggaacttgtcaggatggtctactttaatatgttctcgtctaagagatgaaaatctttggatggttgtacgcgacttttctctaaaggatgacgttgcccaagatcctctcttaaatgaatccatcttatccttggacaagatggacagtctattttccttagatggtttaatatttttgttacccatgatctataaaggtagacctaatcgtctcggatgacctatatatttattttcagttttattatacgcataaattgtaaaaaatatgttaggtttacaaaaatgtctcgtggggcattaatcgtttttgaaggattggacaaatctggaaaaacaacacaatgtatgaacatcatggaatctataccggcaaacacgataaaatatcttaactttcctcagagatccactgtcactggaaagatgatagatgactatctaactcgtaaaaaaacctataatgatcatatagttaatctattattttgtgcaaatagatgggagtttgcatcttttatacaagaacaactagaacagggaattactttaatagttgatagatacgcattttctggagtagcgtatgccgccgctaaaggcgcgtcaatgactctcagtaagagttatgaatctggattgcctaaacccgacttagttatattcttggaatctggtagcaaagaaattaatagaaacgtcggcgaggaaatttatgaagatgttacattccaacaaaaggtattacaagaatataaaaaaatgattgaagaaggagatattcattggcaaattatttcttctgaattcgaggaagatgtaaagaaggagttgattaagaatatagttatagaggctatacacacggttactggaccagtggggcaactgtggatgtaatagtgaaattacattttttataaatagatgttagtacagtgttataaatggatgaagcatattactctggcaacttggaatcagtactcggatacgtgtccgatatgcataccgaactcgcatcaatatctcaattagttattgccaagatagaaactatagataatgatatattaaacaaggacattgtaaattttatcatgtgtagatcaaacttggataatccatttatctctttcctagatactgtatatactattatagatcaagagaactatcagactgagttgattaattcattagacgacaatgaaattatcgattgtatagttaataagtttatgagcttttataaggataacctagaaaatatagtagatgctatcattactctaaaatatataatgaataatccagattttaaaactacgtatgcagaagtactcggttccagaatagccgatatagatattaaacaagtgatacgtaagaatatactacaattgtctaatgatatccgcgaacgatatttgtgaaaatattaaaaaaaaatactttttttattaaatgacgtcgcttcgcgaatttagaaaattatgctgtgatatatatcacgcatcaggatataaagaaaaatctaaattaattagagactttataacagatagggatgataaatatttgatcattaagctattgcttcccggattagacgatagaatttataacatgaacgataaacaaattataaaattatatagtataatatttaaacaatctcaggaagatatgctacaagatttaggatacggatatataggagacactattaggactttcttcaaagagaacacagaaatccgtccacgagataaaagcattttaactttagaagaagtggatagttttttaactacgttatcatccgtaactaaagaatcgcatcaaataaaattattgactgatatcgcatccgtttgtacatgtaatgatttaaaatgtgtagtcatgcttattgataaagatctaaaaattaaagcgggtcctcggtacgtacttaacgctattagtcctaatgcctatgatgtgtttagaaaatctaataacttgaaagagataatagaaaatgcatctaaacaaaatctagactctatatctatttctgttatgactccaattaatcccatgttagcggaatcgtgtgattctgtcaataaggcgtttaaaaaatttccatcaggaatgtttgcggaagtcaaatacgatggtgaaagagtacaagttcataaaaataataacgagtttgccttctttagtagaaacatgaaaccagtactctctcataaagtggattatctcaaagaatacataccgaaagcatttaaaaaagctacgtctatcgtattggattctgaaattgttcttgtagacgaacataatgtaccgctcccgtttggaagtttaggaatacacaaaaagaaagaatataaaaactctaacatgtgtttgttcgtgtttgactgtttgtactttgatggattcgatatgacggacattccattgtacgaacgaagatcttttctcaaagatgttatggttgaaatacccaatagaatagtattctcagagttgacgaatattagtaacgagtctcagttaactgacgtattggatgatgcactaacgagaaaattagaaggattggtcttaaaagatattaatggagtatacgaaccgggaaagagaagatggttaaaaataaagcgagactatttgaacgagggttccatggcagattctgccgatttagtagtactaggtgcttactatggtaaaggagcaaagggtggtatcatggcagtctttctaatgggttgttacgacgatgaatccggtaaatggaagacggttaccaagtgttcaggacacgatgataatacgttaagggagttgcaagaccaattaaagatgattaaaattaacaaggatcccaaaaaaattccagagtggttagtagttaataaaatctatattcccgattttgtagtagaggatccgaaacaatctcagatatgggaaatttcaggagcagagtttacatcttccaagtcccataccgcaaatggaatatccattagatttcctagatttactaggataagagaggataaaacgtggaaagaatctactcatctaaacgatttagtaaacttgactaaatcttaatagttacatacaaactgaaaattaaaataacactatttagttggtggtcgccatggatggtgttattgtatactgtctaaacgcgctagtaaaacatggcgaggaaataaatcatataaaaaatgatttcatgattaaaccatgttgtgaaagagtttgtgaaaaagtcaagaacgttcacattggcggacaatctaaaaacaatacagtgattgcagatttgccatatctggataatgcggtatccgatgtatgcaattcactgtataaaaagaatgtatcaagaatatccagatttgctaatttgataaagatagatgacgatgacaagactcctactggtgtatataattattttaaacctaaagatgccattcctgttattatatccataggaaaggatagagatgtttgtgaactattaatctcatcagacatatcgtgtgcatgcgtggagttaaattcatatcacgtagccattcttcccatggatgtttccttttttaccaaaggaaatgcatcattgattattctcctgtttgatttctctatcgatgcggcacctctcttaagaagtgtaaccgataataatgttattatatctagacaccagcgtatacatgacgagcttccgagttccaattggttcaagttttacataagtataaagtccgactattgttctatattatatatggttgttgatggatctgtgatgcatgcgatagctgataatagaactcacgcaattattagcaaaaatatattagacaatactacgattaacgatgagtgtagatgctgttattttgaaccacagattaggattcttgatagagatgagatgctcaatggatcatcgtgtgatatgaacagacattgtattatgatgaatttacctgatgtaggcgaatttggatctagtatgttggggaaatatgaacctgacatgattaagattgctctttcggtggctggtaatttaataagaaatcgagactacattcccgggagacgaggatatagctactacgtttacggtatagcctctagataatttttttaagcacgaaataaaaaacataattttaaaccaatctatttcatactattttgtgtgatcaccatggacataaagatagatattagtatttctggtgataaatttacggtgactactaggagggaaaatgaagaaagaaaaaaatatctacctctccaaaaagaaaaaactactgatgttatcaaacctgattatcttgagtacgatgacttgttagatagagatgagatgtttactattctagaggaatattttatgtacagaggtctattaggcctcagaataaaatatggacgactctttaacgaaattagaaaattcgacaatgatgcggaagaacaattcggtactatagaagaactcaagcagaaacttagattaaattctgaagagggagcagataactttatagattatataaaggtacaaaaacaggatatcgtcaaacttactgtatacgattgcatatctatgataggattgtgtgcatgcgtggtagatgtttggagaaatgagaaactgttttctagatggaaatattgtttacgagcgattaaactgtttattgatgatcacatgcttgataagataaaatctatactgcagaatagactagtatatgtggaaatgtcatagaaagttaaaagttaatgagagcaaaaatatataaggttgtattccatatttgttatttttttctgtaatagttagaaaaatacattcgatggtctatctatcagattattatgtgttataaggtactttttctcataataaactagagtatgagtaagatagtgtttttcaaaacatataaatctaaaattgatggatgagatatacagctattaatttcgaaaatatattttaatctgataactttaaacatggatttttgatggtggtttaacgttttaaaaaaagattttgttattgtagtatatgataatattaaaagatggatataaagaatttgctgactgcatgtactattttttacattactacattggctacggcagatatacctacttcgtcactgccacacgctccggtaaacggggcatgtgacgagggagaatatcttgataagaggcataatcaatgttgtaatcagtgtccacctggagaatttgccaaggtcagatgtagtggtagtgataacacaaaatgtgaacgctgcccacctcatacatataccgcaatccccaattactctaatggatgtcatcaatgtagaaaatgcccaacaggatcatttgataaggtaaagtgtaccggaacacagaacagtaaatgttcgtgtcttcctggttggtattgcgctactgattcttcacagactgaagattgtcgagattgtataccaaaaaggagatgtccatgcggatactttggtggaatagatgaacaaggaaatcctatttgtaaatcgtgttgtgttggtgaatattgcgactacctacgtaattatagacttgatccatttcctccatgcaaactatctaaatgtaattaattatgattttgatgataatgttaccatacattatatcgctacttggttagtgtattattcagtatgaagacctattaataattacttatcttttgacgatcttgttataattataatataaaaatacttatggcatagtaactcataattgctgacgcgataaattcgtaataatctgttttgttcaaaggaatctacaggcataaaaataaaaatataatttataatatactcttacagcgcgccatcatgaataacagcagtaaattaattgctgttattaatggatttagaaatagtggacgattttgtgatattaatatagttattaatgatgaaaggataaacgctcacagactcatcctatctggagcctccgaatatttttccattctgttttccaataattttatcgattctaatgaatacgaagttaatctaagtcatttagattatcaaagcgtaaacgatttgatcgattacatttatgggatacctttgagcctaactaacgataacgtgaaatatattctttcaaccgctgattttttacaaattggatctgctattacggagtgtgaaaattacatacttaaaaatctttgttctagaaactgtatcgatttctacatatacgctgataaatataataacaagaaaatagaatcagcgtcgtttaacacaatattacaaaatattttgagactcatcaacgatgaaaactttaaatacttaacagaggaatcaatgataaaaattttaagcgatgatatgttaaatataaaaaatgaggatttcgccccactaattctcattaaatggttagagagtactcaacaaccatgcaccgtcgagttacttaaatgcctcagaatatcattgctttccccacaagttataaaatcactttatagtcatcgactggttagttcaatctacgaatgtataacattcttaaacaatatagcattcttggatgaatcatttcctagataccatagcatcgagttgatatctatcggtataagtaattcgcatgataagatttccataaactgctacaatcataaaaaaaatacatgggaaatgatatcttcacgtagatataggtgtagtttcgcagtggccgtcctggataatattatttatatgatgggtggatatgatcagtccccgtatagaagttcaaaggttatagcgtacaatacatgtacaaattcttggatatatgatataccagagctaaaatatcctcgttctaattgtgggggactggctgatgacgaatacatttattgtataggcggcatacgcgatcaggattcatcgttgacatctagtattgatagatggaagccatcaaaaccatattggcagaagtatgctaaaatgcgcgaaccaaaatgtgatatgggggttgcgatgttaaacggattaatatatgttataggtggaatcgttaaaggtgacacgtgtaccgacgcactagagagtttatcagaagatggatggatgaagcatcaacgtcttccaataaaaatgtccaatatgtcgacgattgttcatgatggcaagatttatatatctggaggttacaacaatagtagtgtagttaatgtaatatcgaatttagtccttagctataattcgatatatgatgaatggaccaaattatcatcattaaacattcctagaattaatcccgctctatggtcagcgcataataaattatatgtaggaggaggaatatctgatgatgttcgaactaatacatctgaaacatacgacaaagaaaaagattgttggacattggataatggtcacgtgttaccacgcaattatataatgtataaatgcgaaccgattaaacataaatatccattggaaaaaacacagtacacgaatgattttctaaagtatttggaaagttttataggtagttgatagaacaaaatacataattttgtaaaaataaatcactttttatactaatatgacacgattaccaatacttttgttactaatatcattagtatacgctacaccttttcctcagacatctaaaaaaataggtgatgatgcaactctatcatgtaatcgaaataatacaaatgactacgttgttatgagtgcttggtataaggagcccaattccattattcttttagctgctaaaagcgacgtcttgtattttgataattataccaaggataaaatatcttacgactctccatacgatgatctagttacaactatcacaattaaatcattgactgctagagatgccggtacttatgtatgtgcattctttatgacatcgcctacaaatgacactgataaagtagattatgaagaatactccacagagttgattgtaaatacagatagtgaatcgactatagacataatactatctggatctacacattcaccggaaactagttctgagaaacctgattatatagataattctaattgctcgtcggtattcgaaatcgcgactccggaaccaattactgataatgtagaagatcatacagacaccgtcacatacactagtgatagcattaatacagtaagtgcatcatctggagaatccacaacagacgagactccggaaccaattactgataaagaagatcatacagttacagacactgtctcatacactacagtaagtacatcatctggaattgtcactactaaatcaaccaccgatgatacgtacaatgataatgatacagtaccaccaactactgtaggcggtagtacaacctctattagcaattataaaaccaaggactttgtagaaatatttggtattaccgcattaattatattgtcggccgtggcaatattctgtattacgtattatatatgtaataaacgttcacgtaaatacaaaacagagaacaaagtctagatttttgacttacataaatgtctgggatagtaaaatctatcatattgagcgggccatctggtttaggaaagacagccatagccaaaagactatgggaatatatttggatttgtggtgtcccataccactagatttcctcgtcctatggaacgagaaggtgtcgattaccattacgttaacagagaggccatctggaagggaatagccgccggaaactttctagaacatactgagtttttaggaaatatttacggaacttctaaaactgctgtgaatacagcggctattaataatcgtatttgtgtgatggatctaaacatcgatggcgttagaagtcttaaaaatacgtacctaatgccttactcggtgtatataagacctacctctcttaaaatggttgagaccaagcttcgttgtagaaacactgaagcggatgatgagattcatcgtcgtgtgatgttggcaaaaactgacatggatgaggcaggtgaagccggtctattcgacactattatcattgaagatgatgtgaatttagcatatagtaagttaattcagatactacaggaccgtattagaatgtattttaacactaattagagacttaagacttaaaacttgataattaataatataactcgtttttatatgtggctatttcaacgtctaatgtattagttaaatattaaaacttaccacgtaaaacttaaaatttaaaatgatatttcattgacagatagatcacacattatgaactttcaaggacttgtgttaactgacaattgcaaaaatcaatgggtcgttggaccattaataggaaaaggtggatttggtagtatttatactactaatgacaataattatgtagtaaaaatagagcccaaagctaacggatcattatttaccgaacaggcattttatactagagtacttaaaccatccgttatcgaagaatggaaaaaatctcacaatataaagcacgtaggtcttatcacgtgcaaggcatttggtctatacaaatccattaatgtggaatatcgattcttggtaattaatagattaggtgcagatctagatgcggtgatcagagccaataataatagattaccaaaaaggtcggtgatgttgatcggaatcgaaatcttaaataccatacaatttatgcacgagcaaggatattctcacggagatattaaagcgagtaatatagtcttggatcaaatagataagaataaattatatctagtggattacggattggtttctaaattcatgtctaatggcgaacatgttccatttataagaaatccaaataaaatggataacggtactctagaatttacacctatagattcgcataaaggatacgttgtatctagacgtggagatctagaaacacttggatattgtatgattagatggttgggaggtatcttgccatggactaagatatctgaaacaaagaattgtgcattagtaagtgccacaaaacagaaatatgttaacaatactgcgactttgttaatgaccagtttgcaatatgcacctagagaattgctgcaatatattaccatggtaaactctttgacatattttgaggaacccaattacgacaagtttcggcacatattaatgcagggtgtatattattaagtgtggtgtttggtcgataaaaattaaaaaataacttaatttattattgatctcgtgtgtacaaccgaaatcatggcgatgttttacgcacacgctctcggtgggtacgacgagaatcttcatgcctttcctggaatatcatcgactgttgccaatgatgtcaggaaatattctgttgtgttagtttataataacaagtatgacattgtaaaagacaaatatatgtggtgttacagtcaggtgaacaagagatatattggagcactgctgcctatgtttgagtgcaatgaatatctacaaattggagatccgatccatgatcaagaaggaaatcaaatctctatcatcacatatcgccacaaaaactactatgctctaagcggaatcgggtacgagagtctagacttgtgtttggaaggagtagggattcatcatcacgtacttgaaacaggaaacgctgtatatggaaaagttcaacatgattattctactatcaaagagaaggccaaagaaatgagtacacttagtccaggacctatcatcgattaccacgtctggataggagattgtatctgtcaagttactgctgtggacgtacatggaaaggaaattatgaaaatgagattcaaaaagggtgcggtgcttccgatcccaaatctggtaaaagttaaacttggggagaatgatacagaaaatctttcttctactatatcggcgacaccatcgaggtaaccacctctctggaagacagcgtgaataatgtactcatgaaacgtttggaaactatacgccatatgtggtctgttgtatatgatcattttgatattgtgaatggtaaagaatgctgttatgtgcatacgcatttgtctaatcaaaatcttataccgagtactgtaaaaacaaatttgtacatgaagactatgggatcatgcattcaaatggattccatggaagctctagagtatcttagcgaactgaaggaatcaggtggatggagtcccagaccagaaatgcaggaatttgaatatccagatggagtggaagacactgaatcaattgagagattggtagaggagttcttcaatagatcagaacttcaggctggtgaatcagtcaaatttggtaattctattaatgttaaacatacatctgtttcagctaagcaactaagaacacgtatacggcagcagcttccttctatactctcatcttttaccaacacaaagggtggatatttgttcattggagttgataataatacacacaaagtatttggattcacggtgggttacgactacctcagactgatagagaatgatatagaaaagcatatcaaaagactttgtgttgtgtatttctgtgagaagaaagaggacatcaagtacgcgtgtcgattcatcaaggtatataaacctggggatgaggctacctcgacatacgtgtgcgctatcaaagtggaaagatgctgttgtgctgtgtttgcagattggccagaatcatggtatatggatactaatggtatcaagaagtattctccagatgaatgggtgtcacatataaaattttaattaatgtaatagagaacaaataataaggttgtaatatcatatagacaataactaacaattaattagtaactgttatctcttttttaactaaccaactaactatatacctattaatacatcgtaattatagttcttaacatctattaatcattgattcgcttctttaattttttataaactaacattgttaattgaaaagggataacatgttacagaatataaattatatatggatttttttaaaaaggaaatacttgactggagtatatatttatctcttcattatatagcacgcgtgttttccaatttttccacatcccatataatacaggattataatctcgttcgaacatacgagaaagtggataaaacaatagttgattttttatctaggttgccaaatttattccatattttagaatatggggaaaatattctacatatttattctatggatgatgctaatacgaatattataattttttttctagatagagtattaaatattaataagaacgggtcatttatacacaatctcgggttatcatcatccattaatataaaagaatatgtatatcaattagttaataatgatcatccagataataggataagactaatgcttgaaaatggacgtagaacaagacattttttgtcctatatatcagatacagttaatatctatatatgtattttaataaatcatggattttatatagatgccgaagacagttacggttgtacattattacatagatgtatatatcactataagaaatcagaatcagaatcatacaatgaattaattaagatattgttaaataatggatcagatgtagataaaaaagatacgtacggaaacacaccttttatcctattatgtaaacacgatatcaacaacgtggaattgtttgagatatgtttagagaatgctaatatagactctgtagactttaatagatatacacctcttcattatgtctcatgtcgtaataaatatgattttgtaaagttattaatttctaaaggagcaaatgttaatgcgcgtaataaattcggaactactccattttattgtggaattatacacggtatctcgcttataaaactatatttggaatcagacacagagttagaaatagataatgaacatatagttcgtcatttaataatttttgatgctgttgaatctttagattatctattatccagaggagttattgatattaactatcgtactatatacaacgaaacatctatttacgacgctgtcagttataatgcgtataatacgttggtctatctattaaacaaaaatggtgattttgagacgattactactagtggatgtacatgtatttcggaagcagtcgcaaacaacaacaaaataataatggaagtactattgtctaaacgaccatctttgaaaattatgatacagtctatgatagcaattactaaacataaacagcataatgcagatttattgaaaatgtgtataaaatatactgcgtgtatgaccgattatgatactcttatagatgtacagtcgctacagcaatataaatggtatattttaagatgtttcgatgaaatagatatcatgaagagatgttatataaaaaataaaactgtattccaattagttttttgtatcaaagacattaatactttaatgagatacggtaaacatccttctttcgtgaaatgcactagtctcgacgtatacggaagtcgtgtacgtaatatcatagcatctattagatatcgtcagagattaattagtctattatccaagaagctggatcctggagataaatggtcgtgttttcctaacgaaataaaatataaaatattggaaaactttaacgataacgaactatccacatatctaaaaatcttataaacattattaaaatataaaatctaagtaggataaaatcacactacatcattgtttccttttagtgctcgacagtgtatactatttttaacgctcataaataaaaatgaaaacgatttccgttgttacgttgttatgcgtactacctgctgttgtttattcaacatgtactgtacccactatgaataacgctaaattaacgtctaccgaaacatcgtttaatgataaccagaaagttacgtttacatgtgatcagggatatcattctttggatccaaatgctgtctgtgaaacagataaatggaaatacgaaaatccatgcaaaaaaatgtgcacagtttctgattatgtctctgaactatataataaaccgctatacgaagtgaattccaccatgacactaagttgcaacggcgaaacaaaatattttcgttgcgaagaaaaaaatggaaatacttcttggaatgatactgttacgtgtcctaatgcggaatgtcaacctcttcaattagaacacggatcgtgtcaaccagttaaagaaaaatactcatttggggaatatatgactatcaactgtgatgttggatatgaggttattggtgcttcgtacataagttgtacagctaattcttggaatgttattccatcatgtcaacaaaaatgtgatatgccgtctctatctaacggattaatttccggatctacattttctatcggtggcgttatacatcttagttgtaaaagtggttttacactaacggggtctccatcatccacatgtatcgacggtaaatggaatcccatactcccaatatgtgtacgaactaacgaaaaatttgatccagtggatgatggtcccgacgatgagacagatttgagcaaactctcgaaagacgttgtacaatatgaacaagaaatagaatcgttagaagcaacttatcatataatcatagtggcgttgacaattatgggcgtcatatttttaatctccgttatagtattagtttgttcctgtgacaaaaataatgaccaatataagttccataaattgctaccgtaaatataaatccgttaaaataattaataatttaataacaaacaagtatcaaaagattaaagacttatagctagaatcaattgagatgtcttcttcagtggatgttgatatctacgatgccgttagagcatttttactcaggcactattataacaagagatttattgtgtatggaagaagtaacgccatattacataatatatacaggctatttacaagatgcgccgttataccgttcgatgatatagtacgtactatgccaaatgaatcacgtgttaaacaatgggtgatggatacacttaatggtataatgatgaatgaacgcgatattactgtaagcgttggcaccggaatactattcatggaaatgtttttcgattacaataaaaatagtatcaacaatcaactaatgtatgatataattaatagcgtatctataattctagctaatgagagatatagaagcgcttttaacgacgatggtatatacatccgtagaaatatgattaacaagttgtacggatacgcatctctaactactattggcacgatcgctggaggtgtttgttattatctgttgatgcatctagttagtttgtataaataattatttcaatatactagttaaaattttaagattttaaatgtataaaaaactaataacgtttttatttgtaataggtgcattagcatcctattcgaataatgagtacactccgtttaataaactgagtgtaaaactctatatagatggagtagataatatagaaaattcatatactgatgataataatgaattggtgttaaattttaaagagtacacaatttctattattacagagtcatgcgacgtcggatttgattccatagatatagatgttataaacgactataaaattattgatatgtataccattgactcgtctactattcaacgcagaggtcacacgtgtagaatatctaccaaattatcatgccattatgataagtacccttatattcacaaatatgatggtgatgagcgacaatattctattactgcagagggaaaatgctataaaggaataaaatatgaaataagtatgatcaacgatgatactctattgagaaaacatactcttaaaattggatctacttatatatttgatcgtcatggacatagtaatacatattattcaaaatatgatttttaaaaatttaaaatatattatcacttcagtgacagtagtcaaataacaaacaacaccatgagatatattataattctcgcagttttgttcattaatagtatacatgctaaaataactagttataagtttgaatccgtcaattttgattccaaaattgaatggactggggatggtctatacaatatatcccttaaaaattatggcatcaagacgtggcaaacaatgtatacaaatgtaccagaaggaacatacgacatatccgcatttccaaagaatgatttcgtatctttctgggttaaatttgaacaaggcgattataaagtggaagagtattgtacgggactatgcgtcgaagtaaaaattggaccaccgactgtaacattgactgaatacgacgaccatatcaatttgtacatcgagcatccgtatgctactagaggtagcaaaaagattcctatttacaaacgcggtgacatgtgtgatatctacttgttgtatacggctaacttcacattcggagattctaaagaaccagtaccatatgatatcgatgactacgattgcacgtctacaggttgcagcatagactttgtcacaacagaaaaagtgtgcgtgacagcacagggagccacagaagggtttctcgaaaaaattactccatggagttcgaaagtatgtctgacacctaaaaagagtgtatatacatgcgcaattagatccaaagaagatgttcccaatttcaaggacaaaatggccagagttatcaagagaaaatttaatacacagtctcaatcttatttaactaaatttctcggtagcacatcaaatgatgttaccacttttcttagcatgcttaacttgactaaatattcataactaatttttattaatgatacaaaaacgaaataaaactgcatattatacactggttaacgcccttataggctctaaccattttcaagatgaggtccctgattatagtccttctgttcccctctatcatctactccatgtctattagacgatgtgagaagactgaagaggaaacatggggattgaaaatagggttgtgtataattgccaaagatttctatcccgaaagaactgattgcagtgttcatctcccaactgcaagtgaaggattgataactgaaggcaatggattcagggatatacgaaacaccgataaattataaaaaaagcaatgtgtccgctgtttccgttaataatactattttcgtaactggcggattattcataaataactctaatagcacgatcgtggttaacaatatggaaaaacttgacatttataaagacaaacaatggtcgattatagaaatgcctatggctagggtatatcacggcatcgactcgacatttggaatgttatattttgccggaggtctatccgttaccgaacaatatggtaatttagagaaaaacaacgagatatcttgttacaatcctagaacgaataagtggtttgatatttcatatactatttataagatatccatatcatcattgtgtaaactaaataacgtcttctatgtatttagtaaggacattggatatgtggaaaagtatgatggtgcatggaagttagtacatgatcgtctccccgctataaaggcattatcaacttctccttattgattgaaaatgaaaatataaatagtttttatgtatagcagtattaccctatagttttattgcttactactaacatggatacagatgttacaaatgtagaagatatcataaatgaaatagatagagagaaagaagaaatactaaaaaatgtagaaattgaaaataataaaaacattaacaagaatcatccaagtggatatattagagaagcactcgttattaatactagtagtaatagtgattccattgataaagaagttatagaatgtatctgtcacgatgtaggaatatagatcatatctactaatttttataatcgatacaaaacataaaaaacaactcgttattacatagcaggcatggaatccttcaagtattgttttgataacgatggcaagaaatggattatcggaaatactttatattctggtaattcaatactctataaggtcagaaaaaatttcactagttcgttctacaattacgtaatgaagatagatcacaaatcacacaagccattgttgtctgaaatacgattctatatatctgtattggatcctttgactatcgacaactggacacgggaacgtggtataaagtatttggctattccagatctgtatggaattggagaaaccgatgattatatgttcttcgttataaagaattcgggaagagtattcgccccaaaggatactgaatcagtcttcgaagcatgcgtcactatgataaacacgttagagtttatacactctcaaggatttacccatggaaaaatagaaccgaggaatatactgattagaaataaacgtctttcactaattgactattctagaactaacaaactatacaagagtggaaactcacatatagattacaacgaggacatgataacttcaggaaatatcaattatatgtgtgtagacaatcatcttggagcaacagtttcaagacgaggagatttagaaatgttgggatattgcatgatagaatggttcggtggcaaacttccatggaaaaacgaaagtagtataaaagtaataaaacaaaaaaaagaatataaaaaatttatagctactttctttgaggactgttttcctgaaggaaatgaacctctggaattagttagatatatagaattagtatacacgttagattattctcaaactcctaattatgacagactacgtaaactgtttatacaagattgaaattatattcttttttttatagagtgtggtagtgttacggatatctaatattaatattagactatctctatcgcgctacacgaccaatatcgattactatggatatcttctatgaaaggagagaatgtatttatttctccagcgtcaatctcgtcagtattgacaatactgtattatggagctaatggatccactgctgaacagctatcaaaatatgtagaaacggaggagaacacggataaggttagcgctcagaatatctcattcaaatccatgaataaagtatatgggcgatattctgccgtgtttaaagattcctttttgagaaaaattggcgataagtttcaaactgttgacttcactgattgtcgcactatagatgcaatcaacaagtgtgtagatatctttactgaggggaaaatcaatccactattggatgaaccattgtctcctagcaattagtgccgtatactttaaagcaaaatggttgacgccattcgaaaaggaatttaccagtgattatcccttttacgtatctccgacggaaatggtagacgtaagtatgatgtctatgtacggcaaggcatttaatcacgcatctgtaaaagaatcattcggcaacttttcaatcatagaactgccatatgttggagatactagtatgatggtcattcttccagacaagattgatggattagaatccatagaacaaaatctaacagatacaaattttaagaaatggtgtgactttatggatgctatgtttatagatgttcacattcccaagtttaaggtaacaggctcgtataatctggtggatactctagtaaagtcaggactgacagaggtgttcggttcaactggagattatagcaatatgtgtaatttagatgtgagtgtcgacgctatgatccacaaaacgtatatagatgtcaatgaagagtatacagaagcagctgcagcaacttctgtactagtggcagactgtgcatcaacaattacaaatgagttctgtgcagatcatccgttcatctatgtgattaggcatgttgatggaaaaattcttttcgttggtagatattgctctccgacaactaattgttaaccattttttttaaaaaaaatagaaaaaacatgtggtattagtgcaggtcgttgttcttccaattgcaattggtaagatgacggccaactttagtacccacgtcttttcaccacagcactgtggatgtgacagactgaccagtattgatgacgtcaaacaatgtttgactgaatatatttattggtcgtcctatgcataccgcaacaggcaatgcgctggacaattgtattccacactcctctcttttagagatgatgcggaattagtgttcatcgacattcgcgagctggtaaaaaatatgccgtgggatgatgtcaaagattgtacagaaatcatccgttgttatataccggatgagcaaaaaaccatcagagagatttcggccatcatcggactttgtgcatatgctgctacttactggggaggtgaagaccatcccactagtaacagtctgaacgcattgtttgtgatgcttgagatgctaaattacgtggattataacatcatattccggcgtatgaattgatgagttgtacatcttgacattttctttcttctcttctccctttcttctcttctcccttcctccctcttctccctttcccagaaacaaacttttttacccactataaaataaaatgagtatactacctgttatatttctttctatatttttttattcttcattcgttcagacttttaacgcgtctgaatgtatcgacaaagggcaatattttgcatcattcatggagttagaaaacgagccagtaatcttaccatgtcctcaaataaatacgctatcatccggatataatatattagatattttatgggaaaaacgaggagcggataatgatagaattataccgatagataatggtagcaatatgctaattctgaacccgacacaatcagactctggtatttatatatgcattaccacgaacgaaacctactgtgacatgatgtcgttaaatttgacaatcgtgtctgtctcagaatcaaatatagattttatctcgtatccacaaatagtaaatgagagatctactggcgaaatggtatgtcccaatattaatgcatttattgctagtaacgtaaacgcagatattatatggagcggacatcgacgccttagaaataagagacttaaacaacggacacctggaattattaccatagaagatgttagaaaaaatgatgctggttattatacatgtgttttagaatatatatacggtggcaaaacatataacgtaaccagaattgtaaaattagaggtacgggataaaataataccttctactatgcaattaccagatggcattgtaacttcaataggtagtaatttgactattgcatcgttgagacctcccacaacggatgcagacgtcttttggataagtaatggtatgtattacgaagaagatgatggggacggaaacggtagaataagtgtagcaaataaaatctatatgaccgataagagacgtgttattacatcccggttaaacattaatcctgtcaaggaagaagatgctacaacgtttacgtgtatggcgtttactattcctagcatcagcaaaacagttactgttagtataacgtgaatgtatgttgttacatttccatgtcaattgagtttataagaatttttatacattatcttccaacaaacaattgacgaacgtattgctatgattaactcccacgatactatgcatattattaatcattaacttgcagactatacctagtgctattttgacatactcatgttcttgtgtaattgcggtatctatattattaaagtacgtaaatctagctatagttttattatttaattttagataatataccgtctccttatttttaaaaattgccacatcctttattaaatcatgaatgggaatttctatgtcatcgttagtatattgtgaacaacaagagcagatatctataggaaagggtggaatgcgatacattgatctatgtagttttaaaacacacgcgaactttgaagaatttatataaatcattccatcgatacatccttctatgttgagatgtatatatccaggaattcgtttattaatatcgggaaatgtataaactaaaacattgcccgaaagcggtgcctctatctgcgttatatccgttcttaacttacaaaatgtaaccaatacctttgcatgacttgttttgttcggcaacgttagtttaaacttgacgaatggattaattacaatagcatgatccgcgcatctattaagtttttttactttaacgcccttgtatgtttttacagagactttatctaaatttctagtgcttgtatgtgttataaatataacgggatatagaaccgaatcacctaccttagatacccaattacattttatcagatccagataataaacaaattttgtcgccctaactaattctatattgttatatattttacaattggttatgatatcatgtaataacttggagtctaacgcgcatcgtcgtacgtttatacaattgtgatttagtgtagtatatctacacatgtatttttccgcactatagtattctggactagtgataaaactatcgttatatctatcttcaatgaactcatcgagatattgctctctgtcatattcatacacctgcataaactttctagacatcttacaatccgtgttattttaggatcatatttacatatttacgggtatatcaaagatgttagattagttaatgggaatcgtctataataatgaatattaaacaattatatgaggacttttaccacaaagcatcataaaaatgagtcgtcgtctgatttatgttttaaatatcaaccgcaaatcaactcataaaatacaagagaatgaaatatatacatattttagtcattgcaatatagaccatacttctacagaacttgattttgtagttaaaaactatgatctaaacagacgacaacctgtaactgggtatactgcactacactgctatttgtataataattactttacaaacgatgtactgaagatattattaaatcatggagtggatgtaacgatgaaaaccagtagcggacgtatgcctgtttatatattgcttactagatgttgtaatatttcacatgatgtagtgatagatatgatagacaaagataaaaaccacttattacatagagactattccaacctattactagagtatataaaatctcgttacatgttattaaaggaagaggatatcgatgagaacatagtatccactttattagataagggaatcgatcctaactttaaacaagacggatatacagcgttacattattattatttgtgtctcgcacacgtttataaaccaggtgagtgtagaaaaccgataacgataaaaaaggccaagcgaattatttctttgtttatacaacatggagctaatctaaacgcgttagataattgtggtaatacaccattccatttgtatcttagtattgaaatgtgtaataatattcatatgactaaaatgctgttgacttttaatccgaatttcgaaatatgtaataatcatggattaacgcctatactatgttatataacttccgactacatacaacacgatattcttgttatgttaatacatcactatgaaacaaatgttggagaaatgccgatagatgagcgtcgtatgatcgtattcgagtttatcaaaacatattctacacgtccggcagattcgataacttatttgatgaataggtttaaaaatataaatatttatacccgctatgaaggaaagacattattacacgtagcatgtgaatataataatacacacgtaatagattatcttatacgtatcaacggagatataaatgcgttaaccgacaataacaaacacgctacacaactcattatagataacaaagaaaattccccatataccattaattgtttactgtatatacttagatatattgtagataagaatgtgataagatcgttggtggatcaacttccatctctacctatctttcgtcgcttatcatactagtcatatcctaaatgttgatcatattccaccaaatgattgtgaaagagattgagattaaatcgtctaacaaacaattagtttttatgacattaacatataataaataaattaatcattattgacttaacgatgacgaaagttatcatcatcttaggattcttgattattaatacaaattcattgtctatgaaatgtgaacaaggtgtctcatattataattcacaagaattaaagtgttgtaaactatgtaagccaggaacatattcagatcatcgatgtgataaatacagcgataccatttgtggacattgtccgagtgacacattcacgtcaatatataatcgttctccttggtgtcatagttgtagaggtccatgtggtactaatcgagtagaggtcacaccttgtacacctaccacaaatagaatctgtcattgtgactcgaatagttattgtctccttaaagcttctgatggtaactgtgttacatgtgctcctaaaacaaaatgtggtcgtgggtatggaaagaaaggagaagatgaaatgggtaataccatttgtaagaaatgtcggaagggtacttattcagatattgtatctgactctgatcaatgtaaaccaatgacaagataagacttactcgcatctactggatagacataaaatatcctcctcgtaataatgaaatataaatatacactaattattaatatcaataacaatcgagtattaatatataggtcatttttaaatcccttttgggttccgtcccaaacggcgtttcggtctgcgtcgccgccatggccatgccgagcctctccgcgtgctcctccatcgaggacgacttcaactatggcagctcggtggcgtctgccagcgtgcacatacgaatggcatttctaagaaaagtctacggtatcctttgtctacaatttcttttaacaacggcaacaactgcagtatttttatactttgactgcatgcggacatttatacaagggagtcctgttctaatattggcatcaatgttcggatctataggcttgattttcgcattgactttacacagacataaacatcccctgaatctgtacctgctttgtggatttacactgtcggaatctctaacgctggcctctgttgttactttctatgatgtgcatgtcgttatgcaagctttcatgctgactactgcagcgtttcttgctctgactacatatactctacaatcaaagagagatttcagtaaacttggagcaggattgtttgctgctttgtggattttaattttgtcaggactcttggggatatttgtgcaaaatgagacagtggagctggtcctgtctgcttttggggcccttgtattctgtggattcattatctatgacacgcactcactaatacataagctctcgcctgaagagtatgtgttagcctctatcaatctctacttggatatcatcaatctgttcttgcatctgttgcagcttttggaagtatctaataagaaataaagtttaaaatagaattaataaaaacatataggtcattttttaaacatggattggaaaccaaggtagttagttaatacacacaagatatatttttttcacatcatccacccatgggtaacaccaaggttgttagttaataatatacaagatattttttctcactctgatccatgtaaaccaaggacgagataagacactctcattcctcatccacaacccattaaaaaaatggaaattaaagccctctattagcataaacggctacaggtctaccatcaggttaaccttcgtctaccttcacaatggcctttccttgtgcccagttcagaccctgtcattgccacgctactaaggactccctgaataccgtggccgacgtcagacattgtctgactgaatacatcctgtgggtttctcatagatggacccatagagaaagcgctcatctgttctccgtgtggtctcggaacatattctcacaccgtctcttccgcagataaatgcgaacccgtacccagaaatacctttaactatatcgatgtggaaattaatctgtatcccgtcaacgacacatcgtgtactcggacgaccactaccggtctcagcgaatccatctcaacgtcggaactaactattactatgaatcataaagactgtaatcccgtctttcgtgatggatacttctccgttcttaataaggtagcgacttcaggtttctttacaggagaaaggtgtgcactctgaatttcgagattaaatgcaataacaaagattcttcctccaaacagttaacgaaagcaaagaatgatactatcatgccgcattcggagacagtaactctagtgggcgacatctatatactatatagtaataccaatactcaagactacgaaactgatacaatctcttatcatgtgggtaatgttctcgatgtcgatagccatatgcccggtagttgcgatatacataaactgatcactaattccaaacccacccactttttatagtaagtttttcacccataaataataaatacaataattaatttctcgtaaaagtagaaaatatattctaatttattgcacggtaaggaagtagaatcataaagaacagtactcaatcaatagcaattatgaaacaatatatcgtcctggcatgcatgtgcctggcggcagctgctatgcctgccagtcttcagcaatcatcctcatcctcctcctcgtgtacggaagaagaaaacaaacatcatatgggaatcgatgttattatcaaagtcacaaagcaagaccaaacaccgaccaatgataagatttgccaatccgtaacggaaattacagagtccgagtcagatccagatcccgaggtggaatcagaagatgattccacatcagtcgaggatgtagatcctcctaccacttattactccatcatcggtggaggtctgagaatgaactttggattcaccaaatgtcctcagattaaatccatctcagaatccgctgatggaaacacagtgaatgctagattgtccagcgtgtccccaggacaaggtaaggactcatgaagaagctcttgctatgatcaaagactgtgaggtgtctatcgacatcagatgtagcgaagaagagaaagacagcgacatccagtactcgggtctaacatctctcataagaaagtgagttacgaagatatcatcggttcaacgatcgtcgatacaaaatgtgtcaagaatctagagtttagcgttcgtatcggagacatgtgcaaggaatcatctgaacttgaggtcaaggatggattcaagtatgtcgacggatcggcatctgaaggtgcaaccgatgatacttcactcatcgattcaacaaaactcaaagcgtgtgtctgaatcgataactctattcatctgaaattggatgagtagggttaatcgaacgattcaggcacaccacgaattaaaaaagtgtaccggacactatattccggtttgcaaaacaaaaatgttcttaactacattcacaaaaagttacctctcgcgacttcttctttttctgtctcaatagtgtgatacgattatgacactattcctattcctattcctatttcctttcagagtatcacaaaaatattaaacctctttctgatggtctcataaaaaaagttttacaaaaatatttttattctctttctctctttgatggtctcataaaaaaagttttacaaaaatatttttattctctttctctctttgatggtctcataaaaaaagttttacaaaaatatttttattctctttctctctttgatggtctcataaaaaaagttttacaaaaatatttttattctctttctctctttgatggtctcataaaaaaagttttacaaaaatatttttattctctttctctctttgatggtctcataaaaaaagttttacaaaaatatttttattctctttctctctttgatggtctcataaaaaaagttttacaaaaatatttttattctctttctctctttgatggtctcataaaaaaagttttacaaaaatatttttattctctttctctctttgatggtctcataaaaaaagttttacaaaaatatttttattctctttctctctttgatggtctcataaaaaaagttttacaaaaatatttttattctctttctctctttgatggtctcataaaaaaa

SEQ ID NO: 6 - DNA, 193964 bp, Vaccinia virus
  LIVP 2.1.1
gagatagttagtctagatatttttcttagtacaaaagtcaatgttttaaaatatatggacaagaatttgtctgtataaaaacttgtgtgaaattttgtaccaaagaaaaaatgtgagcagtatcccctacatggattttactagatcatttatataccaaaaaatattatacgatctacgttttattatatgattttaacgtgtaaattataaacattattttatgatatacaattgtctggtaacctagatgggcataggggatgttgataagctcgacgagtatatgttgttggacgttattgtttaagaaatagttgatgcatcagaaagagaataaaaaatattttagtgagaccatcgaagagagaaagagataaaacttttttacgactccatcagaaagaggtttaatatttttgtgagaccatcgaagagagaaagagaataaaaatattttatgactccattgaagagagaaaaagaaaatgagaatgagaataaaaatattttagtgacaccatcagaaagaggtttaatatttttgtgagaccatcgaagagagaaagagaataaaaatattttatgactccattgaagagagaaagagaaaatgagaatgagaataaaaatattttagtgacaccatcagaaagaggtttaatattttttatgagaccatcaaagagagaaagaaaataaaaatatttttgtaaaactttttttatgagaccatcaaagagagaaagagaataaaaatatttttgtaaaactttttttatgagaccatcaaagagagaaagagaataaaaatatttttgtaaaactttttttatgagaccatcaaagagagaaagagaataaaaatatttttgtaaaactttttttatgagaccatcaaagagagaaagagaataaaaatatttttgtaaaactttttttatgagaccatcaaagagagaaagagaataaaaatatttttgtaaaactttttttatgagaccatcaaagagagaaagagaataaaaatatttttgtaaaactttttttatgagaccatcaaagagagaaagagaataaaaatatttttgtaaaactttttttatgagaccatcaaagagagaaagagaataaaaatatttttgtaaaactttttttatgagaccatcaaagagagaaagagaataaaaatatttttgtaaaactttttttatgagaccatcaaagagagaaagagaataaaaatatttttgtaaaactttttttatgagaccatcagaaagaggtttaatatttttgtgatactctgaaaggaaataggaataggaataggaatagtgtcataatcgtatcacactattgagacagaaaaagaagaagtcgcgagaggtaactttttgtgaatgtagttaagaacatttttgttttgcaaaccggaatatagtgtccggtacacttttttaattcgtggtgtgtctgaatcgttcgattaaccctactcatccaatttcagatgaatagagttatcgattcagacacacgctttgagttttgttgaatcgatgagtgaagtatcatcggttgcaccttcagatgccgatccgtcgacatacttgaatccatccttgacctcaagttcagatgattccttgcacatgtctccgatacgaacgctaaactctagattcttgacgcattttgtatcgacgatcgttgaaccgatgatatcttcgtaactcactttcttatgagagatgttagacccgagtactggatgggtcttgatgtcgctgtctttctcttcttcgctacatctgatgtcgatagacacttcacagtctttgatcatagcaagagcttcttcatgagtgatcgcgggagagtccttaccttgtcctggggacacgctggacaatctagcattcactgtgtttccatcagcggattctgagatggatttaatctgaggacatttggtgaatccaaagttcattctcagacctccaccgatgatggagtaataagtggtaggaggatctacatcctcgactgatgtggaatcatcttctgattccacctcgggatctggatctgactcggactctgtaatttccgttacggattggcaaatcttatcattggtcggtgtttggtcttgctttgtgactttgataataacatcgattcccatatgatgtttgttttcttcttccgtacacgaggaggaggatgaggatgattgctgaagactggcaggcatagcagctgccgccaggcacatgcatgccaggacgatatattgtttcataattgctattgattgagtactgttctttatgattctacttccttaccgtgcaataaattagaatatattttctacttttacgagaaattaattattgtatttattatttatgggtgaaaaacttactataaaaagtgggtgggtttggaattagtgatcagtttatgtatatcgcaactaccgggcatatggctatcgacatcgagaacattacccacatgataagagattgtatcagtttcgtagtcttgagtattggtattactatatagtatatagatgtcgcccactagagttactgtctccgaatgcggcatgatagtatcattctttgctttcgttaactgtttggaggaagaatctttgttattgcatttaatctcgaaattcagagtgcacacctttctcctgtaaagaaacctgaagtcgctaccttattaagaacggagaagtatccatcacgaaagacgggattacagtctttatgattcatagtaatagttagttccgacgttgagatggattcgctgagaccggtagtggtcgtccgagtacacgacgtgtcgttgacgggatacaggttaatttccacatcgatatagttaaaggtattactgggtacgggttcgcatttatctgcggaagagacggtgtgagaatatgttccgagaccacacggagaacagatgacgtctccggatactccgtatcctattctacattttgtttgggaaacacatgccttgcatccggatgatcctttgagaagacaataatatccgggagagcattcacagattctattgtgagtcgtgttacacgatcgcgtcttccgttacaacttagacaagcgggtaaatgattattgcgagatgtgaaggtacccgaaccacacggcgtacattgtgtgttagtcttgctatcgcataatctggaagcgtatgttcccggacacaaattatggcgtttgtattcgttgtctttacactttccatcggatggtgcatgcggtgctatatctcttccgtttattattatacatgagagaaacaatatatacgagtataatacggacttcatgatttaataatgtagtaatcgtcgtcttgttcctgtttcctacttctccaatcatatagatattttctttctatcatggataatatttgtaatggttctttccgtacaacatactgtttagatgatattgcgcataatttccggaggcaaatacgatagtctagattgaccgatggtagactctaatttattgagtgctttgtcgacgagtttacttttacgctccatcgatagatggcactgttctatgagatcgtcgtacatgggaaatgaaatgtgactgtctgaatgtatggctttaagatagctgtgataccgtatacaggtcggtgtcggagattcgaatctctttaaggcgacttatgtcacgatgatggaatctatcttatcgaatgatatatttttcataaatacacttttatagtcctcgtttaaacagaatttactatgtagttccgcgaatgactcgtcccttaataggcagtaggctagtatcttttttacgtagtaatcgtcgtagggagagacatcttgtagaacaacgatttaatcataggtagagatactttcagtctgtggtggatgatgtcattcacaacatccgccttgtatatgatgtttctgttttcaaacaccaagtcgaataccgtctttagtcggaaggttgatgtcgtatccgatgtatgaggcaacattgttgttacaattttgaaaggcggtattatagtattcgtctttctgaatgtcgaacctatctaatagataccgtagtatattgagagtgtatccttgattatgttttatgaatagataaagtagatgttgtccttcttccttttgttcgtgccaattgagtaacattatgagaatatgacctgttgcacaatcgttccatgatgggtgtacaatcaagattattacgtatcctcgtatcggctcctcgagataaaagagcatacaccacacgaggactatgtttggtatactgttgaaggtaagtgtgtaaccgcgttaatgtttgctccataatctattatcgcgtagatgaatcgcttctcggctcgcatcttagtgtgacttaacttgtaataattgctttcgtagaacgtggatatgtgtttacagtagtaatgaagagaagtgagttcatcctcgtcggcgcaattagggtcggatcctttgtacagaacgtaatagtttaagctcccattgaatttatatctaagataacacagcaatagatcggatgatttactaaagtcatcaatggtgtccgttagtatatcaaagatcttgttatcgattgatagtggtcatccttgctatcaaagttacgcatgccgtggtgtaacaatatctttaatacagatggattaaatcgtgtattcatcgtatagcaatgtaatggagagttacctcgtttattcagatcgcagtgtttaataactagcttaaacagatgagacgatgtatccacatcaaagaacgtaaaatacatatgacagacattgttgacagaaacgtgaccttcattcttaccgtcgtccataaatacgttaggtatgtaccacatactgtcgcgaacgatgcgtacaatctcgtccatctcataatgatttactttttcataattaaagatgtgaaagaaaaccgaacaatatatttttttagtaatgtttatgcgagacatataaaataaactccgtgtttatgatgccggtaaatgtttttatcatcttggacggaatcgattttgtaatatgtcatggaaacaaatgaaacaggacattatcgctccatgataaattatttaatggagtaataaagtatctccatgggtaatttcgaaatcaagttatcgtctgtattaatgttgtccactatggagtcgatcctctcattgttctttacagtttctgtaatgatggacgttagttcttttttgtaccatttgatgtcggattctttgcgtatctcaatttgtggcgtttgcttcgtttaaataatatatcaaacatggagacgcctgatatgtagacattcttcattctattaatgtctactctatagcgctttagttccttatgacgaccggcgatatcatactttactttagaaggaaaatcatcatctaggattaaggcgtatctgatacaggcgaataatggttcaggatatagatagcgtatatctctattaaatgcgtcaatcatagtctctagagtgggatggtaactcagtaataaatcaactagcttcgttttgttttctctttggtaactgcttttctggatggccgtattgattatcgagcgtgacactcgctccatattccaataaccgctttgcaaattgtatattattgacatcgaccgcgtaatatagtagagttatcgatcatatctatatcatccatgtacttgcttagtatatcaaatacatctatcagtatggtttcataacagtgatacccgcaattattaaatctcgataatatcagaccgtacatacatagacggccattgttcgatacgtgatttacagccgcgtgtccatattttccacgataaaccttacgacgtttacatcgacgagattattattaacaaagtagtcgtgcagaggatagttgttgtccgttatctaacatgcatcgaacgaccatatcgccgtaatgtaagtagtttatcaacatggcttgtacatcctgttgtctaaatctctttagaatgttatcgatgatgtagtggttatattctctggaatcgtacgaagtaatactacgcattacgtcgacaagagtatgacgtctctcaataagaagattaacgatttccatgtctacattatatggggttactctaaatcgcttgtttagataatatagggctgacgtcgtatactctacacgtgtccacatcctttattaataataatttaacaatctctatatctatggttgagaaagaccagtagtattggatgggtaaagatcctccttcgtctctgccatggatggaaacattgttatcgatcaaacatttaattacatccttggatagagattgagattctctatgagacgatatatagtaatgaagagagttcttacacatatcactgtcgtacatacaggtacgaaatacgtaaccggtgctgtaacattctgatttaagaagccatagcaatacttctggtctcggattaggcgtcgttacgtatatatccaccaatccgagaccattgattgcataattcgtattcttggacggacgtatccgtttatccacaattaggtattttagcagacgtaagtcgatattatccgaatacagatcgaaatcatttatattcgacttgagttcgttagaggaatttgaatagctggatatcagtagatgcacaatctgagatttgacgtatctatgcttactgtatactcctagcggagttaatccttcgttgtttctacaaagtctctcgactccgcgagagaacaatcttaatgtctgtatcgcatttattggagacgtaacaatgtagcgcattgtttcctcgtctatctatatgttttgataagttgtgacacgtttcaatttctagttttatttttttgtacgtcacatcttcatccagtagacgacatagaatagtgcactctctaccacaataatccatagctattctggtgctaattattcctatttcacgaaggcaatcattcctcataagatgataaaaagtgtagtggagatttagtatttagcagtgcggatatgatccaagagggtgagatagtcgttctcgttcagaatctttcgcagcataagtagtatgtcgatatacttatcgttgaagactctttataaaagtctatttgtttatatttattgcggatagcagtatttccctataaaaagtatacgtcctgtggtgtctttaatcatgtacatgaatggatggtttatgtagaccttcgtacgatataccatcgaaaagttaatcgtaaatactcctgtaacggccgatgcttctgtatactcctcattaacatctataaacgtcgtatgtagaaatttttctacagtgatagtttcattacacatcttgctaaaatctgcataatatccgaatatattagtaagtcctaaattttctaaaatcggtaccagattatacggttctgtcatttccactttaaactttggcatatacaagtctatacttttagtagataacataccacaccattttttaaatttttcatctgttatatttttttctatgttatatataccttctatgtcgtccggtagtataattaccatactagagtttccctcgtatggaatatcgataatagagaatcctccgaataattcattaatatgtacatattgcaagttattctcggtacccaccatcatatcaacgctggtaactatattcttagaaatataaaacttgtctgtatatgtaagatgtttagaaaatggatatttccacattgctttaaaatggacggcgctaacaactgtcatacgagtattaatggatagcggactagtcaataaggaattaattttaccatttgtcattgtcttaacccattcgttgattagttcctttgtttggttagcattattaaagtttacagtttgaaaatcgtcttttattttttgtaggaaggaggcgtggaactcgatactatcgctaccgtatattttatttgcggtagctagtgtcgcacaatacggaatatctacctccatgtcatcattattgtcatcgggtgtattctcattcatattctctatatattttgatagttgttcagctgtagaaccagctgctccatgatttagaatagataaagtagataaaatggaaactggagaaatcaaaacattttcatcagggtgttttaagattagttctttaaagatatccatggtatagacctaacgataacgatatatatcataaataaataatgttaaatttcaatttatgtttgtaccccgtattcatacttaacaaattggtattgcgtacacaatcaatcatattacataccattaataatgcaagcataaaaaattgttagtagatgtttctaaatataggttccgtaagcaaagaatataagaatgaagcggtaatgataaaatcaatcgttatctaaaatgatcatactcatttattttattctattatattaacacatacatttttaacagcaacacattcaatattgtattgttatttttatattatttacacaattaacaatatattattagtttatattactgaattaataatataaaattcccaatcttgtcataaacacacactgagaaacagcataaacacagaatccatcaaaaatgttgataaattatctgatgttgttgttcgctgctatgataatcagatcattcgccgatagtggtaacgctatcgaaacgacattgccagaaattacaaacgctacaacagatattccagctatcagattatgcggtccagagggagatggatattgtttacacggtgactgtatccacgctagagatattgacggtatgtattgtagatgctctcatggttatacaggcattagatgtcagcatgtagtattagtagactatcaacgttcagaaaacccaaacactacaacgtcatatatcccatctcccggtattatgcttgtattagtaggcattattatgtgttgtctattatctgtttataggttcactcgacgaactaaactacctatacaagatatggttgtgccataatttttataaattttttttatgagtatttttacaaaaatgtataaagtgtatgtcttatgtatatttataaaaatgctaagtatgcgatgtatctatgttatttgtatttatctaaacaatacctctacctctagatattatacaaaaattttttatttcggcatattaaagtaaaatctagttaccttgaaaatgaatacagtgggtggttccgtatcaccagtaagaacataatagtcaaatacagtatccgattgagattttgcatacaatactagtctagaaagaaatttgtaatcatcttctgtgacgggagtccatatatctgtatcatcgtctagtttatcagtgtcccatgctatattcctgttatcatcattagttaatgaaaataactctcgtgcttcagaaaagtcaaatattgtatccatacatacatctccaaaactatcgcttatacgtttatctttaacgatacctatacctagatggttatttactaacagacattttccagatctattgactataactcctatagtttccacatcaaccaagtaatgatcatctattgttatataacaataacataactcttttccatttttatcagtatgtatatctatatcaacgtcgtcgttgtagtgaatagtagtcattgatctattatatgaaacggatatgtctagaacggcaattgttttacgtccagttaacactttcgttgatttaaagtctagagtctttgcaaacataatatccttatccgactttatatttcctgtagggtggtataattttattttgcctccacatatcggtgtttccaaatatattactagacaatattccatatagttattagttaagggtacccaattagaacacgtacgcttattatcatcatttggatcgtatttcataaaagttattgtgttatcgatgtcaacacattctacattttttaatcgtctatatagtatttttctgatattttctataatatcagaattgtcttccatcggaagttgtatactatcggaatcagttacatgtttaaataattctctgatgtcattccttatacaatcaaattcattattaaacagtttaatagtctgtagacctttatcgtcgtaaatatccattgtcttattagttacgcttatttttatgtgttttacgttgctttattatattttataagaatgattgtttgacgaatcacgagaactattaagacacattattaggtatatattataaaaaagtttttgattacgatgttataagaggaaagaggacacattaacatcatacatcaattaactacattcttataacatcgtaatcaaaagaattgcaattttgatgtataacaactgtcaatgggttatggaattgtatattacatattatacggtatgttggtaacgacaaataccggtcggtaattgtctgccggtgtaatagaattatatatatctatctattacaccggccttgtatacataataataagttgtggtagtatgatctccatatttataatttaggactttgtattcagtatttttggaatcataaaaaataaaaaaaagttttactaatttaaaatttaaaaagtatttacatttttttcactgtttagtcgcggatatggaattcgatcctgccaaaatcaatacatcatctatagatcatgtaacaatattacaatacatagatgaaccaaatgatataagactaacagtatgcattatccgaaatattatatcaatatcacaaaaataaatacacatttggctaatcaatttcgggcttggaaaaaacgtatcgccggaagggactatatgactaacttatctagagatacaggaatacaacaatcaaaacttactgaaactatacgtaactgtcaaaaaaatagaaacatatatggtctatatatacactacaatttagttattaattggataaccgatgtgattatcaatcaatattaagagggttggtaaattggtacatagctaataatacctatactccaaatacacccaataatacaacaaccatttctgagttggatatcatcaaaatactggataaatacgaggacgtgtatagagtaagtaaagaaaaagaatgtggaatttgctatgaagttgtttactcaaaacgatagatactttggtttattggattcgtgtactcatatattttgcataacatgcatcaatatatggcataaaacacgaagagaaaccggtgcgtcggataattgtcctatatgccgtacccgttttagaaacataacaatgagcaagttctataagctagttaactaataaataaaaagtttaatttgttgacgacgtatgtcgttattttttctcgtataaaagattaatttgattctaatataatctttagtattggataaatatcaattcaaattaattccattagattatatcataaataaaaatagtagcacgcactacttcagccaaatattcttttttgaaacgccatctatcgtagtgaggacacaagtgaacctataattatcaaatttattagtatcagtcacatgaaggactttacgtagagtgacgattccactatctgtggtacgaacggtttcatcttctttgatgccatcacccagatgttctataaacttggtatcctcgtccgatctcatatcctttgccaaccaatacatgtagctaaaattaggcataaatttcacacatcctgaacaatgaaattctccagaagatgttacaatgtctagatttggacatttggtttcaaccgcgttaacatatgagtgaacacacccatacatgaaagcgatgagaaataggattctcatcttgccaaaatatcactagaaaaaatttatttatcaattttaaaggtataaaaaatacttattgttgctcgaatattttgtatttgatggtatacggaagattagaaatgtaggtattatcatcaactgattctatggttttatgtattctatcatgtttcactattgcgttggaaataatatcatatgcttccacatatattttattttgttttaactcataatactcacgtaattctggattattggcatatctatgaataattttagctccatgatcagtaaatattaatgagaacatagtattaccacctaccattatttttttcatctcattcaattcttaattgcaaagatctatataatcattatagcgttgacttatggactctggaatcttagacgatgtacagtcatctataatcatggcatatttaatacattgttttatagcatagtcgttatctacgatgttagatatttctctcaatgaatcaatcacacaatctaatgtaggtttatgacataatagcattttcagcagttcaatgtttttagattcgttgatggcaatggctatacatgtatatccgttatttgatctaatgttgacatctgaaccggattctagcagtaaagatactagagattgtttattatatctaacagccttgtgaagaagtgtttctcctcgtttgtcaatcatgttaatgtctttaagataaggtaggcaaatgtttatagtactaagaattgggcaagcataagacatgtcacaaagaccctttttgtatgtataagtgtagaaattataacatccatagttggatttacataggtgtccaatcgggatctctccatcatcgagataattgatggcatctcccttccttttttagtagatatttcatcgtgtaagaatcaatattaatatttctaaagtatccgtgtatagcctctttatttaccacagttccatattccactagagggatatcgccgaatgtcatatactcaattagtatatgttggaggacatccgagttcattgttttcaatatcaaagagatggtttccttatcatttctccatagtggtacaatactacacattatttcgtgcggctttccattttccaaaaacaatttgaccaaatctacatctttattgtatctataatcactatttagataatcagccataattcctcgagtgcaacatgttagatcgtctatatatgaataagccgtgttatctattcctttcattaacaatttaacgatgtctatatctatatgagatgacttaatataatattgaagagctgtacaatagtttttatctataaaagacggcttgattccgtgattaattagacatttaacaacttccggacgcacatatgctctcgtatccgactctgaatacagatgagagatgatatacagatgcaatacggtaccgcaatttcgtagttgataatcatcatacgcgtatcagtactcgtcctcataaagaacactgcagccattttctatgaacaaatcaataatttcaggaacaggatcatctgtcattacataattttctataactgaacgatggttttcacatttaacactcaagtcaaatccatgttctaccaacacctttatcaagtcaacgtctacatttttggatttcatatagctgaatatattaaagttatttatgttgctaaatccagtggcttctagtagagccatcgctatatccttattaactttaacatgtctactatttgtgtattcttctaatggggtaagctgtctccaatttttgcgtaatggattagtgccactgtctagtagtagtttgacgacctcgacattattacaatgctcattaaaaaggtatgcgtgtaaagcattattcttgaattggttcctggtatcattaggatctctgtctctcaacatctgtttaagttcatcgagagccacctcctcattttccaaatagtcaaacattttgactgaatgagctactgtgaactctatacacccacacaactaatgtcattaaatatcatgtcaaaaacttgtacaattattaataaaaataatttagtgtttaaattttaccagttccagattttacacctccgttaatacctccattaaccccactggacgatcctcctccccacattccaccgccaccagatgtataagttttagatcctttattactaccatcatgtccatggataaagacactccacatgccgccactaccccctttagaagacatattaataagacttaaggacaagtttaacaataaaattaatcacgagtaccctactaccaacctacactattatatgattatagtttctatttttacagtaccttgactaaagtttctagtcacaagagcaatactaccaacctacactattatatgattatagtttctatttttataggaacgcgtacgagaaaatcaaatgtctaatttctaacggtagtgttgataaacgattatcgtcaatggatacctcctctatcatgtcgtctattttcttactttgttctattaacttattagcattatatattatttgattataaaacttatattgcttattagcccaatctgtaaatatcggattattaacatatcgtttctttgtaggtttatttaacttgtacatcactgtaagcatgtccttaccatttattttaatttgacgcatatccgcaatttctttttcgcagtcggttataaattctatatatgatggatacatgctacatgtgtacttataatcgactaatatgaagtacttgatacatatttccagtaacgatttattattaccacctatgaataagtacctgtgatcgtctaggtaatcaactgttttcttaatacattcgatggttggtaatttactcagaataatttccaatatcttaatatataattctgctatttctgggatatatttatctgccagtataacacaaatagtaatacatgtaaacccatattttgttattatattaatgtctgcgccattatctattaaccattctactaggctgacactatgcgactcaatacaatgataaagtatactacatccatgtttatctattttgtttatatcattaatatacggcttacaaagttttagtatcgataacacatccaactcacgcatagagaaggtagggaataatggcataatatttattaggttatcatcattgtcattatctacaactaagtttccattttttaaaatatactcgacaactttaggatctctattgccaaatttttgaaaatatttatttatatgcttaaatctatataatgtagctccttcatcaatcatacatttaataacattgatgtatactgtatgataagatacatattctaacaatagatcttgtatagaatctgtatatcttttaagaattgtggatattaggatattattacgtaaactattacacaattctaaaatataaaacgtatcacggtcgaataatagttgatcaactatataattatcgattttgtgatttttcttcctaaactgtttacgtaaatagttagatagaatattcattagttcatgaccactatagttactatcgaataacgcgtcaaatatttcccgtttaatatcgcatttgtcaagataataatagagtgtggtatgttcacgataagtataataacgcatctctttttcgtgtgaaattaaatagtttattacgtccaaagatgtagcataaccatcttgtgacctagtaataatataataatagagaactgttttacccattctatcatcataatcagtggtgtagtcgtaatcgtaatcgtctaattcatcatcccaattataatattcaccagcacgtctaatctgttctattttgatcttgtatccatactgtatgttgctacatgtaggtattcctttatccaataatagtttaaacacatctacattgggatttgatgttgtagcgtatttttctacaatattaataccatttttgatactatttatttctatacctttcgaaattagtaatttcaataagtctatatcgatgttatcagaacatagatattcgaatatatcaaaatcattgatatttttatagtcgactgacgacaataacaaaatcacgacatcgtttttgatattattatttttcttggtaacgtatgcctttaatggagtttcaccatcatactcatataatggatttgcaccactttctatcaatgattgtgcactgctggcatcgatgttaaatgttttacaactatcatagagtatcttatcgttaaccatgattggttgttgatgctatcgcattttttggtttctttcatttcagttatgtatggatttagcacgtttgggaagcatgagctcatatgatttcagtactgtagtgtcagtactattagtttcaataagatcaatctctagatctatagaatcaaaacacgataggtcagaagataatgaatatctgtaggcttcttgttgtactgtaacttctggttttgttagatggttgcatcgtgctttaacgtcaatggtacaaattttatcctcgctttgtgtatcatattcgtccctactataaaattgtatattcagattatcatgcgatgtgtatacgctaacggtatcaataaacggagcacaccatttagtcataaccgtaatccaaaaatttttaaagtatatcttaacgaaagaagttgtgtcattgtctacggtgtatggtactagatcctcataagtgtatatatctagagtaatgtttaatttattaaatggttgataatatggatcctcgtgacaatttccgaagatggaaataagacataaacacgcaataaatctaattgcggacatggttactccttaaaaaaatacgaataatcaccttggctatttagtaagtgtcatttaacactatactcatattaatccatggactcataatctctatacgggattaacggatgttctatatacggggatgagtagttctcttctttaactttatactttttactaatcatatttagactgatgtatgggtaatagtgtttgaagagctcgttctcatcatcagaataaatcaatatctctgtttttttgttatacagatgtattacagcctcatatattacgtaatagaacgtgtcatctaccttattaactttcaccgcatagttgtttgcaaatacggttaatcctttgacctcgtcgatttccgaccaatctgggcgtataatgaatctaaactttaattgcttgtaatcattcgaaataatttttagtttgcatccgtagttatcccctttatgtaactgtaaatttctcaacgcgatatctccattaataatgatgtcgaattcgtgctgtatacccatactgaatggatgaacgaataccgacggcgttaatagtaatttactttttcatctttacatattgggtactagttttactatcataagtttataaattccacaagctactatggaataagccaaccatcttagtataacacacatgtcttaaagtttattaattaattacatgttgttttatatatcgctacgaatttaaacagagaaatcagtttaggaaaaaaaattatctatctacatcatcacgtctctgtattctacgatagagtgctactttaagatgcgacagatctgtgtcatcaaatatatactccattaaaatgattattccggcagcgaacttgatattggatatatcacaacctttgttaatatctacgacaatagacagcagtcccatggttccataaacagtgagtttatctttctttgaagagatattttgtagagatcttataaaactgtcgaatgacatcgcatttatatttttagctaaatcgtatatgttaccatcgtaatatctaaccgcgtctatcttaaacgtttccatcgctttaaagacgtttccgatagatggtctcatttcatcagtcatactgagccaacaaatataatcgtgtataacatctttgatagaatcagactctaaagaaaacgaatcggctttattatacgcattcatgataaacttaatgaaaaatgtttttcgttgtttaagttggatgaatagtatgtcttaataattgttattatttcattaattaatatttagtaacgagtacactctataaaaacgagaatgacataactaatcataactagttatcaaagtgtctaggacgcgtaattttcatatggtatagatcctgtaagcattgtctgtattctggagctattttctctatcgcattagtgagttcagaatatgttataaatttaaatcgaataacgaacataactttagtaaagtcgtctatattaactcttttattttctagccatcgtaataccatgtttaagatagtatattctctagttactacgatctcatcgttgtctagaatatcacatactgaatctacatccaattttagaaattggtctgtgttacatatctcttctatattattgttgatgtattgtcgtagaaaactattacgtagaccattttctttataaaacgaatatatagtactccaattatctttaccgatatatttgcacacataatccattctctcaatcactacatctttaagattttcgttgttaagatatttggctaaactatataattctattagatcatcaacagaatcagtatatatttttctagatccaaagacgaactctttggcgtcctctataatattcccagaaaagatattttcgtgttttagtttatcgagatctgatctgttcatatacgccatgattgtacggtacgttatgataaccgcataaaataaaaatccattttcatttttaaccaatactattcataattgagattgatgtaatactttgttactttgaacgtaaagacagtacacggatccgtatctccaacaagcacgtagtaatcaaatttggtgttgttaaacttcgcaatattcatcaatttagatagaaacttatactcatcatctgttttaggaatccatgtattattaccactttccaacttatcattatcccaggctatgtttcgtccatcatcgttgcgcagagtgaataattcttttgtattcggtagttcaaatatatgatccatgcatagatcggcaaagctattgtagatgtgatttttcctaaatctaatataaaactcgtttactagcaaacactttcctgatttatcgaccaagacacatatggtttctaaatctatcaagtggtggggatccatagttatgacgcagtaacatatattattacattcttgactgtcgctaatatctaaatatttattgttatcgtattggattctgcatatagatggcttgtatgtcaaagatatagaacacataaccaatttatagtcgcgctttacattctcgaatctaaagttaagagatttagaaaacattatatcctcggatgatgttatcactgtttctggagtaggatatattaaagtctttacagatttcgtccgattcaaataaatcactaaataatatcccacattatcatctgttagagtagtatcattaaatctattatattttatgaaagatatatcactgctcacctctatatttcgtacatttttaaactgtttgtataatatctctctgatacaatcagatatatctattgtgtcggtagacgataccgttacatttgaattaatggtgttccattttacaacttttaacaagttgaccaattcatttctaatagtatcaaactctccatgattaaatattttaatagtatccattttatatcactacggacacaaagtagctgacataaaccattgtataatttttatgttttatgtttattagcgtacacattttggaagttccggcttccatgtatttcctggagagcaagtagatgatgaggaaccagatagtttatatccgtacttgcacttaaagtctacattgtcgttgtatgagtatgatcttttaaacccgctagacaagtatccgtttgatattgtaggatgtggacatttaacaatctgacacgtgggtggatcggaccattctcctcctgaacacaggacactagagttaccaatcaacgaatatccactattgcaactataagttacaacgctcccatcggtataaaaatcctcgtatccgttatgtcttccgttggatatagatggaggggattggcatttaacagattcacaaataggtgcctcgggattccataccatagatccagtagatcctaattcacaatacgatttagattcaccgatcaactgatatccgctattacaagagtacgttatactagagccaaagtctactccaccaatatcaagttggccattatcgatatctcgaggcgatgggcatctccgtttaatacattgattaaagagtgtccatccagtacctgtacatttagcatatataggtcccattttttgctttctgtatccaggtagacatagatattctatagtgtctcctatgttgtaattagcattagcatcagtctccacactattcttaaatttcatattaatgggtcgtgacggaatagtacagcatgatagaacgcatcctattcccaacaatgtcaggaacgtcacgctctccaccttcatatttatttatccgtaaaaatgttatcctggacatcgtacaaataataaaaagcccatatatgttcgctattgtagaaattgtttttcacagttgctcaaaaacgatggcagtgacttatgagttacgttacactttggagtctcatctttagtaaacatatcataatattcgatattacgagttgacatatcgaacaaattccaagtatttgattttggataatattcgtattttgcatctgctataattaagatataatcaccgcaagaacacacgaacatctttcctacatggttaaagtacatgtacaattctatccatttgtcttccttaactatatatttgtatagataattacgagtctcgtgagtaattccagtaattacatagatgtcgccgtcgtactctacagcataaactatactatgatgtctaggcatgggagacttttttatccaacgatttttagtgaaacattccacatcgtttaatactacatatttctcatacgtggtataaactccacccattacatatatatcatcgtttacgaataccgacgcgcctgaatatctaggagtaattaagtttggaagtcttatccatttcgaagtgccgtgtttcaaatattctgccacacccgttgaaatagaaaattctaatcctcctattacatataactttccatcgttaacacaagtactaacttctgattttaacgacgacatattagtaaccgttttccattttttcgtttcaagatctacccgcgatacggaataaacatgtctattgttaatcatgccgccaataatgtatagacaattatgtaaaacatttgcattatagaattgtctatctgtattaccgactatcgtccaatattctgttctaggagagtaatgggttattgtggatatataatcagagtttttaatgactactatattatgttttataccatttcgtgtcactggctttgtagatttggatatagttaatcccaacaatgatatagcattgcgcatagtattagtcataaacttgggatgtaaaatgttgatgatatctacatcgtttggatttttatgtatccactttaataatatcatagctgtaacatcctcatgatttacgttaacgtcttcgtgggataagatagttgtcagttcatcctttgataattttccaaattctggatcggatgtcaccgcagtaatattgttgattatttctgacatcgacgcattatatagttttttaattccatatcttttagaaaagttaaacatccttatacaatttgtgaaattaatattatgaatcatagtttttacacatagatctactacaggcggaacatcaattattatggcagcaactagtatcatttctacattgtttatggtgatgtttatcttcttccagcgcatatagtctaatagcgattcaaacgcgtgatagtttataccattcaatataatcgcttcatcctttagatggtgatcctgaatgcgtttaaaaaaattatacggagacgccgtaataatttccttattcacttgtataatttccccattgatagaaaatattacgctttccattcttaaagtactataagtaattatagtataatgtaaacgtttatatattcaatatttttataaaaatcattttgacattaattcctttttaaatttccgtctatcatctatagaaacgtattctatgaatttataaaatgcttttacgtgtcctatcgtaggcgatagaaccgctaaaaagcctatcgaatttctacaaaagaatctgttatatggtatagggagagtataaaacattaaatgtccgtacttattaaagtattcagtagccaatcctaactctttcgaatacttattaatggctcttgttctgtacgaatctatttttttgaacaacggacctagtggtatatcttgttctatgtatctaaaataatgtctgactagatccgttagtttaatatccgcagtcatcttgtctagaatggcaaatctaactgcgggtttaggctttagtttagtttctatatctacatctatgtctttatctaacaccaaaaatataatagctaatattttattacaatcatccggatattcttctacgatctcactaactaatgtttctttggttatactagtatagtcactatcggacaaataaagaaaatcagatgatcgatgaataatacatttaaattcatcatctgtaagatttttgagatgtctcattagaatattattagggttagtactcattatcattcggcagctattacttattttattatttttcaccatatagatcaatcattagatcatcaaaatatgtttcaatcatcctaaagagtatggtgaatgactcttcccatctaatttctgaacgttcaccaatgtctctagccactttggcactaatagcgatcattcgcttagcgtcttctatattattaactggttgattcaatctatctagcaatggaccgtcggacagcgtcattctcatgttcttaatcaatgtacatacatcgccgtcatctaccaattcatccaacaacataagctttttaaaatcatcattataataggtttgatcgttgtcatttctccaaagaatatatctaataagtagagtcctcatgattagttaacaactattttttatgttaaatcaattagtacaccgctatgtttaatacttattcatattttagtttttaggattgagaatcaatacaaaaattaatgcatcattaattttagaaatacttagtttccacgtagtcaatgaaacatttgaactcatcgtacaggacgttctcgtacaggacgtaactataaaccggtttatatttgttcaagatagatacaaatccgataactttttttacgaattctacgggatccactttaaaagtgtcataccgggttctttttatttttttaaacagatcaatggtgtgatgttgattaggtcttttacgaatttgatatagaatagcgtttacatatcctccataatggtcaatcgccatttgttcgtatgtcataaattctttaattatatgacactgtgtattatttagttcatccttgttcattgttaggaatctatccaaaatggcaattatactagaactataggtgcgttgtatacacatattgatgtgtctgtttatacaatcaatgctactaccttcgggtaaaattgtagcatcatataccatttctagtactttaggttcattattatccattgcagaggacgtcatgatcgaatcataaaaaaatatattatttttatgttattttgttaaaaataatcatcgaatacttcgtaagatactccttcatgaacataatcagttacaaaacgtttatatgaagtaaagtatctacgatttttacaaaagtccggatgcataagtacaaagtacgcgataaacggaataataatagatttatctagtctatctttttctatagctttcatagttagatacatggtctcagaagtaggattatgtaacatcagcttcgataaaatgactgggttatttagtcttacacattcgctcatacatgtatgaccgttaactacagagtctacactaaaatgattgaacaatagatagtctaccattgtttcgtattcagatagtacagcgtagtacatggcatcttcacaaattatatcattgtctaatagatatttgacgcatcttatggatcccacttcaacagccatcttaaaatcggtagaatcatattgctttcctttatcattaataatttctagaacatcatctctatcataaaagatacaaatattaactgtttgatccgtaataacattgctagtcgatagcaatttgttaataagatgcgctgggctcaatgtcttaataagaagtgtaagaggactatctccgaatttgttttgtttattaacatccgttgatggaagtaaaagatctataatgtctacattcttgactgttttagagcatacaatatggagaggtgtatttccatcatgatctggttttgagggactaattcctagtttcatcatccatgagattgtagaagcttttggattgtctgacataagatgtctatgaatatgatttttgccaaatttatccactatcctggcttcgaatccgatggacattatttttttaaacactctttctgaaggatctgtacacgccaacaacggaccacatccttcttcatcaaccgagttgttaatcttggctccatactgtaccaataaatttattctctctatgacttcatcatctgttcccgagagataatatagaggcgttttatgctgtttatcacacgcgtttggatctgcgccgtgcgtcagcagcatcgcgactattctattattattaattttagaagctatatgcaatggataatttccatcatcatccgtctcatttggagagtatcctctatgaagaagttcttcgacaaatcgttcatctagtcctttaattccacaatacgcatgtagaatgtgataattatttccagaaggttcgatagcttgtagcatattcctaaatacatctaaatttttactattatatttggcataaagagatagataatactcggccgacataatgttgtccattgtagtataaaaattaatatttctatttctgtatatttgcaacaatttactctctataacaaatatcataacttagttcttttatgtcaagaaggcactggtttagttcatctataaatgtcacgccataactaccacgcatgccatactcagaattatgataaagatatttatccttggggtgtaggtaatggggattaatctttgttggatcagtctctaagttaacacatgtcacacatgatccatttatagttatatcacacgatgatgatttatgaattgattccggaagatcgctatcgtattttgtggttccacaattcatttccatacatgttattgtcacactaatattatgatgaactttatctagccgctgagtggtaaacaacagaacagatagtttattatctttaccaacaccctcagccgctgccacaaatctctgatccgtatccatgatggtcatgtttatttctagtccgtatccagtcaacactatgttagcatttctgtcgatatagctttcactcatatgacactcaccaataatagtagaattaatgtcgtaatttacaccaatagtgagttcggcggcaaagtaccaataccggtaatcttgtcgaggaggacatatagtattcttgtattctaccgaatacccgagagatgcgatacaaaagagcaagactaatttgtaaaccatcttactcaaaatatgtaacaatagtacgatgcaatgagtaagacaataggaaatctatcttatatacacataattattctatcaattttaccaattagttagtgtaatgttaacaaaaatgtgggagaatctaattagtttttctttacacaattgacgtacatgagtctgagttccttgtttttgctaattatttcatccaatttattattcttgacgatatcgagatcttttgtataggagtcaaacttgtattcaacatgcttttctataatcattttagctatttcggcatcatccaatagtacattttccagattagcagaatagatattaatgtcgtatttgaacagagcctgtaacatctcaatgtctttattatctatagccaatttaatgtccggaatgaagagaagggaattattggtgtttgtcgacgtcatatagtcgagcaagagaatcatcatatccacgtgtccattttttatagtgatgtgaatacaactaaggagaatagccagatcaaaagtagatggtatctctgaaagaaagtaggaaacaatacttacatcattaagcatgacggcatgataaaatgaagttttccatccagttttcccatagaacatcagtctccaatttttcttaacaaacagttttaccgtttgcatgttaccactatcaaccgcataatacaatgcggtgtttcccttgtcatcaaattgtgaatcatccagtccactgaatagcaaaatctttactattttggtatcttccaatgtggctgcctgatgtaatggaaattcattctctagaagatttttcaatgctccagcgttcaacaacgtacatactagacgcacgttattatcagctattgcataatacaaggcactatgtccatggacatccgccttaaatgtatctttactagagagaaagcttttcagctgcttagacttccaagtattaattcgtgacagatccatgtctgaaacgagacgctaattagtgtatattttttcattttttataattttgtcatattgcaccagaattaataatatctttaatagatctgattagtagatacatggctatcgcaaaacaacatatacacatttaataaaaataatatttattaagaaaattcagatttcacgtacccatcaatataaataaaataatgattccttacaccgtacccatattaaggagattccaccttacccataaacaatataaatccagtaatatcatgtctgatgatgaacacaaatggtgtattaaattccagtttttcaggagatgatctcgccgtagctaccataatagtagatgcctctgctacagttccttgttcgtcgacatctatctttgcattctgaaacattttataaatatataatgggtccctagtcatatgtttaaacgacgcattatctggattaaacatactaggagccatcatttcggctatcgacttaatatccctcttattttcgatagaaaatttagggagtttaagattgtacactttattccctaattgagacgaccaatagtctaattttgcagccgtgatagaatctgtgaaatgggtcatattatcacctattgccaggtacatactaatattagcatccttatacggaaggcgtaccatgtcatattctttgtcatcgattgtgattgtatttccttgcaatttagtaactacgttcatcatgggaaccgttttcgtaccgtacttattagtaaaactagcattgcgtgttttagtgatatcaaacggatattgccatatacctttaaaatatatagtattaatgattgcccatagagtattattgtcgagcatattagaatctactacattagacataccggatctacgttctactatagaattaattttattaaccgcatctcgtctaaagtttaatctatataggccgaatctatgatattgttgataatacgacggtttaatgcacacagtattatctacgaaactttgataagttagatcagtgtacgtatatttagatgttttcagcttagctaatcctgatattaattctgtaaatgctggacccagatctctttttctcaaatccatagtcttcaataattctattctagtattacctgatgcaggcaatagcgacataaacatagaaaacgaataaccaaacggtgagaagacaatattatcatcttgaatatttttatacgctactataccggcattggtaaatccttgtagacgataggcggacgctgaacacgctaacgatagtatcaataacgcaatcatgattttatggtattaataattaaccttatttttatgttcggtataaaaaaattattgatgtctacacatccttttgtaattgacatctatatatccttttgtataatcaactctaatcactttaacttttacagttttccctaccagtttatccctatattcaacatatctatccatatgcatcttaacactctctgccaagatagcttcagagtgaggatagtcaaaaagataaatatatagagcataatcattctcgtatactctgccctttattacatcacccgcattgggcaacgaataacaaaatgcaagcatcttgttaacgggctcgtaaattgggataaaaattatgtttttattgtcttatatctattttattcaagagaatattcaggaatttctttttccggttgtatctcgtcgcagtatatatcatttgtacattgtttcatattttttaatagtttacaccttttagtaggactagtatcgtacaattcatagctgtattttgaattccaatcacgcataaaaatatcttccaattgttgacgaagacctaatccatcatccggtgtaatattaatagatgctccacatgtatccgtaaagtaatttcctgtccaatttgaggtacctatataggccgttttatcggttaccatatatttggcatggtttaccctagaatacggaatgggaggatcagcatctggtacaataaatagctttacttctatatttatgtttttagattttagcatagcgatagatcttaaaaagtttctcatgataaacgaagatcgttgccagcaactaatcaatagcttaacggatacttgtctgtctatagcggatcttcttaattcatcttctatataaggccaaaacaaaattttacccgccttcgaataaataatagggataaagttcataacagatacataaacgaatttactcgcatttctaatacatgacaataaagcggttaaatcattggttctttccatagtacatagttgttgcggtgcagaagcaataaatacagagtgtggaacgccgcttacgttaatactaagaggatgatctgtattataatacgacggataaaagtttttccaattatatggtagattgttaactccaagataccagtatacctcaaaaatttgagtgagatccgctgccaagttcctattattgaagatcgcaatacccaattccttgacctgagttagtgatctccaatccatgttagcgcttcctaaataaatatgtgtattatcagatatccaaaattttgtatgaagaactcctcctaggatatttgtaatatctatgtatcgtacttcaactccggccatttgtagtctttcaacatcctttaatggtttgttagatttattaacggctactctaactcgtactcctcttttgggtaattgtacaatctcgtttaatattatcgtgccgaaattcgtacccacttcatccgataaactccaataaaaagatgatatatctagtgtttttgtggtattggatagaatttccctccacatgttaaatgtagacaaatatactttatcaaattgcatacctataggaatagtttctgtaatcactgcgattgtattatccggattcattttatttgttaaaagaataatcctatatcacttcactctattaaaaatccaagtttctatttctttcatgactgattttttaacttcatccgtttccttatgaagatgatgtttggcaccttcataaatttttatttctctattacaatttgcatgttgcatgaaataatatgcacctaaaacatcgctaatcttattgtttgttccctggagtatgagagtcgggggggtgttaatcttggaaattatttttctaaccttgttggtagccttcaagacctgactagcaaatccagccttaattttttcatgattgactaatgggtcgtattggtatttataaactttatccatatctctagatactgattctggacatagctttccgactggcgcatttggtgtgatggttcccataagtttggcagctagcagattcagtcttgaaacagcatctgcattaactagaggagacattagaatcattgctgtaaacaagtttggattatcgtaagaggctagctcccatggaatgacccaataagtagatttaatagttaccacgtgctgtaccaaagtcatcaatcatcattttttcaccattacttcttccatgtccaatatgatcatgtgagaatactaaaattcctaacgatgatatgttttcagctagttcgtcataacgtccagaatgtttaccagctccatgacttatgaatactaatgccttaggatatgtaataggtttccaatatttacaatatatgtaatcattgtccagattgaacatacagtttgcactcatgattcacgttatataactatcaatattaacagttcgtttgatgatcatattatttttatgttttattgataattgtaaaaacatacaattaaatcaatatagaggaaggagacggctactgtcttttgtaagatagtcatggcgactaaattagattatgaggatgctgttttttactttgtggatgatgataaaatatgtagtcgcgactccatcatcgatctaatagatgaatatattacgtggagaaatcatgttatagtgtttaacaaagatattaccagttgtggaagactgtacaaggaattgatgaagttcgatgatgtcgctatacggtactatggtattgataaaattaatgagattgtcgaagctatgagcgaaggagaccactacatcaattttacaaaagtccatgatcaggaaagtttattcgctaccataggaatatgtgctaaaatcactgaacattggggatacaaaaagatttcagaatctagattccaatcattgggaaacattacagatttgatgaccgacgataatataaacatcttgatactttttctagaaaaaaaattgaattgatgatataggggtcttcataacgcataattattacgttagcattctatatccgtgttaaaaaaaattatcctatcatgtatttgagagttttatatgtagcaaacatgatagctgtgatgccaataagctttagatattcacgcgtgctagtgttagggatggtattatctggtggtgaaatgtccgttatataatctacaaaacaatcatcgcatatagtatgcgatagtagagtaaacatttttatagtttttactggattcatacatcgtctacccaattcggttataaatgaaattgtcgccaatcttacacccaaccccttgttatccattagcatagtattaacttcgttatttatgtcataaactgtaaatgattttgtagatgccatatcatacatgatattcatgtccctattataatcattactaactttatcacaatatatgttgataatatctatatatgatctagtctttgtgggcaactgtctatacaagtcgtctaaacgttgtttactcatatagtatctaacagccatcattacatggtcccgttccgttgatagataatcgagtatgttagtggacttgtcaaatctatataccatattttctggaagtggatatacatagtcgtgatcaacattattgctagcctcatcttctatatcctgtactataccattatctatatcatctacataatctatgatattattacacataaacatcgacaacatactattgtttattatctaagtcctgttgatccaaacccttgatctcctctatttgtactatctagagattgtacttcttccagttctggataatatatacgttgatagattagctgagctattctatctccagtatttacattaaacgtacattttccattattaataagaatgactcctatgtttcccctataatcttcgtctattacaccacctcctatatcaatgccttttagtgacagaccagacctaggagctattctaccatagcagaacttaggcatggacatactaatatctgtcttaattaactgtctttctcctggagggatagtataatcgtaagcgctatacaaatcatatccggcagcacccggcgattgcctagtaggagatttagctctgttagtttccttaacaaatctaactggtgagttaatattcatgttgaacataaaactaatattttatttcaaaattatttaccatcccatatattccatgaataagtgtgatgattgtacacttctatagtatctatatacgatccacgataaaatcctcctatcaatagcagtttattatccactatgatcaattctggattatccctcggataaataggatcatctatcagagtccatgtattgctggattcacaataaaattccgcatttctaccaaccaagaataaccttctaccgaacactaacgcgcatgatttataatgaggataataagtggatggtccaaactgccactgatcatgattgggtagcaaatattctgtagttgtatcagtttcagaatgtcctcccattacgtatataacattgtttatggatgccactgctggattacatctaggtttcagaagactcggcatattaacccaagcagcatccccgtggaaccaacgctcaacagatgtgggatttggtagacctcctactacgtataatttattgttagcgggtatcccgctagcatacagtctggggctattcatcggaggaattggaatccaattgtttgatatataatttaccgctatagcattgttatgtatttcattgttcatccatccaccgatgagatatactacttctccaacatgagtacttgtacacatatggaatatatctataatttgatccatgttcataggatactctatgaatggatacttgtatgatttgcgtggttgtttatcacaatgaaatattttggtacagtctagtatccattttacattatttatacctctgggagaaagataatttgacctgattacatttttgataaggagtagcagatttcctaatttatttcttcgctttatataccacttaatgacaaaatcaactacataatcctcatctggaacatttagttcatcgctttctagaataagtttcatagatagataatcaaaattgtctatgatgtcatcttccagttccaaaaagtgtttggcaataaagtttttagtatgacataagagattggatagtccgtattctatacccatcatgtaacactcgacacaatattcctttctaaaatctcgtaagataaagtttatacaagtgtagatgataaattctacagaggttaatatagaagcacgtaataaattgacgacgttatgactatctatatatacctttccagtatacgagtaaataactatagaagttaaactgtgaatgtcaaggtctagacaaaccctcgtaactggatctttatttttcgtgtatttttgacgtaaatgtgtgcgaaagtaaggagataactttttcaatatcgtagaattgactattatattgcctcctatggcatcaataattgttttgaatttcttagtcatagacaatgctaatatattcttacagtacacagtattgacaaatatcggcatttatgtttctttaaaagtcaacatctagagaaaaatgattatctttttgagacataactcccattttttggtattcacccacacgtttttcgaaaaaattagtttttccttccaatgatatattttccatgaaatcaaacggattggtaacattataaatttttttaaatcccaattcagaaatcaatctatccgcgacgaattctatatatgttttcatcatttcacaattcattcctataagtttaactggaagagccgcagtaagaaattcttgttcaatggatactgcatctgttataatagatctaacggtttcttcactcggtggatgcaataaatgtttaaacatcaaacatgcgaaatcgcagtgcagaccctcgtctctactaattagttcgttggaaaacgtgagtccgggcattaggccacgctttttaagccaaaatatggaagcgaatgatccggaaaagaagattccttctactgcagcaaaggcaataagtctctctccataaccggcgctgtcatgtatccacttttgagcccaatcggccttcttttttacacaaggcatcgtttctatggcattaaagagatagtttttttcattactatctttaacataagtatcgatcaaaagactatacatttccgaatgaatgttttcaatggccatctgaaatccgtagaaacatctagcctcggtaatctgtacttctgtacaaaatcgttccgccaaattttcattcactattccgtcactggctgcaaaaaacgccaatacatgttttataaaatatttttcgtctggtgttagtttattccaatcattgatatctttagatatatctacttcttccactgtccaaaatgatgcctctgcctttttatacatgttccagatgtcatgatattggattgggaaaataacaaatctatttggatttggtgcaaggatgggttccataactaaattaacaataacaataaattttttttcagttatctatatgcctgtacttggattttttgtacatcgatatcgccgcaatcactacaataattacaagtattattgatagcattgttattagtactatcataattaaattatctacattcatgggtgctgaataatcgttattatcatcattatcattttgtaattgtgacatcatactagataaatcgtttgcgagattgttgtgggaagcgggcatggaggatgcattatcattattatttaacgccttccatttggattcacaaatgttacgcacattcaacattttatggaaactataattttgtgaaaacaaataacaagaaaactcgtcatcgttcaaatttttaacgatagtaaaccgattaaacgtcgagctaatttctaacgctagcgactctgttggatatgggtttccagatatatatcttttcagttcccctacgtatctataatcatctgtaggaaatggaagatatttccatttatctactgttcctaatatcatatgtggtggtgtagtagaaccattaagcgcgaaagatgttatttcgcatcgtattttaacttcgcaataatttctggttagataacgcactctaccagtcaagtcaatgatattagcctttacagatatattcatagtagtcgtaacgatgactccatcttttagatgcgatactcctttgtatgtaccagaatcttcgtacctcaaactcgatatatttaaacaagttaatgagatattaacgcgttttatgaatgatgatatataaccagaagttttatcctcggtggctagcgctataaccttatcattataataccaactagtgtgattaatatgtgacacgtcagtgtgggtacaaatatgtacattatcgtctacgtcgtattcgatacatccgcatacagccaacaaatataaaatgacaaatactctaacgacgttcgtacccatcttgatgcggtttaataaatgttttgatttcaatttattgtaaaaaaagattcggttttatactgttcgatattctcattgcttatattttcatctatcatctccacacagtcaaatccgtggttagcatgcacctcatcaaccggtaaaagactatcggactcttctatcattataactctagaatatttaatttggtcattattaatcaagtcaattatcttatttttaacaaacgtgagtattttactcatttttataaaaacttttagaaatatacagactctatcgtgtgtctatatcttctttttatatccaatgtatttatgtctgatttttcttcatttatcatatataatggtccaaattctacacgtgcttcggattcatccagatcattaaggttcttataattgtaacatccttctcttccctcttctacatcttccttcttattcttattcttagcgtcacagaatctaccacagcaggatcccatgacgagcgtcatattaaactaatccattttcaattataatatatgattagtaatgaccattaaaataaaaaatattcttcataaccggcaagaaagtgaaaagttcacattgaaactatgtcagtagtatacatcatgaaatgatgatatatatactctattttggtggaggattatatgatataattcgtggataatcatttttaagacacatttctttattcgtaaatcttttcacgttaaatgagtgtccatattttgcaatttcttcatatgatggcggtgtacgtggacgaggctgctcctgttcttgttgtagtcgccgactgtcgtgtctgcgtttagatccctccattatcgcgattgcgtagatggagtactattttataccttgtaattaaatttttttattaattaaacgtataaaaacgttccgtatctgtatttaagagccagatttcgtctaatagaacaaatagctacagtaaaaataactagaataattgctacacccactagaaaccacggatcgtaatacggcaatcggttttcgataataggtggaacgtatattttatttaaggacttaacaattgtctgtaaaccacaatttgcttccgcggatcctgtattaactatctgtaaaagcatatgttgaccgggcggagccgaacattctccgatatctaatttctgtatatctataatattattaacctccgcatacgcattacagttcttttctagcttggataccgcactaggtacatcgtctagatctattcctatttcctcagcgatagctcttctatccttttccggaagcaatgaaatcacttcaataaatgattcaaccatgagtgtgaaactaagtcgagaattactcatgcatttgttagttattcggagcgcgcaatttttaaactgtcctataacctctcctatatgaatagcacaagtgacattagtagggatagaatgttgagctaatttttgtaaataactatctataaaaagattatacaaagttttaaactctttagtttccgccatttatccagtctgagaaaatgtctctcataataaatttttccaagaaactaattgggtgaagaatggaaacctttaatctatatttatcacagtctgttttggtacacatgatgaattcttccaatgccgtactaaattcgatatctttttcgatttctggatatgtttttaataaagtatgaacaaagaaatggaaatcgtaataccagttatgtttaactttgaaattgttttttattttcttgttaatgattccagccacttgggaaaagtcaaagtcgtttaatgccgatttaatacgttcattaaaaacaaactttttatcctttagatgaattattattggttcattggaatcaaaaagtaagatattatcgggtttaagatctgcgtgtaaaaagttgtcgcaacagggtagttcgtagattttaatgtataacagagccatctgtaaaaagataaactttatgtattgtaccaaagatttaaatcctaatttgatagctaactcggtatctactttatctgccgaatacagtgctaggggaaaaattataatgtttcctctttcatattcgtagttagttctcttttcatgttcgaaaaagtgaaacatgcggttaaaatagtttataacattaatattactgttaataactgccggataaaagtgggatagtaatttcacgaatttgatactgtcctttctctcgttaaacgcctttaaaaaaactttagaagaatatctcaatgagagttcctgaccatccatagtttgtatcaataatagcaacatatgaagaacacgtttatacagagtatgtaaaaatgttaatttatagtttaatcccatggcccacgcacacacgattaattttttttcatctccctttagattgttgtatagaaatttgggtactgtgaactccgccgtagtttccatgggactatataattttgtggcctcgaatacaaattttactacatagttatctatcttaaagactataccatatcctcctgtagatatgtgataaaaatcgtcgtttataggataaaatcgtttatccttttgttggaaaaaggatgaattaatgtaatcattctcttctatctttagtagtgtttccttattaaaattcttaaaataatttaacaatctaactgacggagcccaattttggtgtaaatctaattgggacattatattgttaaaatacaaacagtctcctaatataacagtatctgataatctatggggagacatccattgatattcaggggatgaatcattggcaacacccatttattgtacaaaaagccccaatttacaaacgaaagtccaggtttgatagagacaaacaattaactattttgtctctgtttttaacacctccacagtttttaatttctttagtaatgaaattattcacaatatcagtatcttctttatctaccagagattttactaacttgataaccttggctgtctcattcaatagggtagtaatatttgtatgtgtgatattgatatctttttgaattgtttcttttagaagtgattctttgatggtgccagcatacgaattacaataatgcagaaactcggttaacatgcaggaattatagtaagccaattccaattgttgcctgtgttgtattagagtgtcaatatgagcaatggtgtccttgcgtttctctgatagaatgcgagcagcgattttggcgttatcatttgacgatatttctggaatgacgaatcctgtttctactaactttttggtaggacaaagtgaaacaatcaagaagatagcttctcctcctatttgtggaagaaattgaactcctctagatgatctactgacgatagtatctccttgacagatattggaccgaattacagaagtacctggaatgtaaagccctgaaaccccctcattttttaagcagattgttgccgtaaatcctgcactatgcccaagatagagagctcctttggtgaatccatctctatgtttcagtttaaccaagaaacagtcagctggtctaaaatttccatctctatctaatacagcatctaacttgatgtcaggaactatgaccggtttaatgttatatgtaacattgagtaaatccttaagttcataatcatcactgtcatcagttatgtacgatccaaacaatgtttctaccggcatagtggatacgaagatgctatccatcagaatgtttccctgattagtattttctatatagctattcttctttaaacgattttccaaatcagtaactatgttcatttttttaggagtaggacgcctagccagtatggaagaggattttctagatcctctcttcaacatctttgatctcgatggaatgcaaaaccccatagtgaaacaaccaacgataaaaataatattgtttttcactttttataattttaccatctgactcatggattcattaatatctttataagagctactaacgtataattctttataactgaactgagatatatacaccggatctatggtttccataattgagtaaatgaatgctcggcaataactaatggcaaatgtatagaacaacgaaattatactagagttgttaaagttaatattttctatgagctgttccaataaattatttgttgtgactgcgttcaagtcataaatcatcttgatactatccagtaaaccgtttttaagttctggaatattatcatcccattgtaaagcccctaattcgactatcgaatatcctgctctgatagcagtttcaatatcgacggacgtcaatactgtaataaaggtggtagtattgtcatcatcgtgataaactacgggaatatggtcgttagtaggtacggtaactttacacaacgcgatatataactttccttttgtaccatttttaacgtagttgggacgtcctgcagggtattgttttgaagaaatgatatcgagaacagatttgatacgatatttgttggattcctgattattcactataatataatctagacagatagatgattcgataaatagagaaggtatatcgttggtaggataatacatccccattccagtattctcggatactctattgatgacactagttaagaacatgtcttctattctagaaaacgaaaacatcctacatggactcattaaaacttctaacgctcctgattgtgtctcgaatgcctcgtacaaggatttcaaggatgccatagattctttgaccaacgatttagaattgcgtttagcatctgatttttttattaaatcgaatggtcggctctctggtttgctaccccaatgataacaatagtcttgtaaagataaaccgcaagaaaatttatacgcatccatccaaataaccctagcaccatcggatgatattaatgtattattatagattttccatccacagttattgggccagtatactgttagcaacggtatatcgaatagattactcatgtaacctactagaatgatagttcgtgtactagtcataatatctttaatccaatctaagaaatttaaaattagattttttacactgttaaagttaacaaaagtattacccgggtacgtggatatcatatatggcattggtccattatcagtaatagctccataaactgatacggcgatggtttttatatgtgtttgatctaacgaggaagaaattcgcgcccacaattcatctctagatatgtatttaatatcaaacggtaacacatcaatttcgggacgcgtatatgtttctaaatttttaatccaaatataatgatgacctatatgccctattatcatactgtcaactatagtacacctagggaacttacgatacatctgtttcctataatcgttaaattttacaaatctataacatgctaaaccttttgacgacaaccattcattaatttctgatatggaatctgtattctcgataccgtatcgttctaaagccagtgctatatctccctgttcgtgggaacgctttcgtataatatcgatcaacggataatctgaagtttttggagaataatatgactcatgatctatttcgtccataaacaatctagacataggaattggaggcgatgatcttaattttgtgcaatgagtcgtcaatcctataacttctaatcttgtaatattcatcatcgacataatactatctatgttatcatcgtatattagtataccatgaccttcttcatttcgtgccaaaatgatatacagtcttaaataattacgcaatatctcaatagtttcataattgttagctgttttcatcaaggtttgtatcctgtttaacatgatggcgttctataacgtctctattttctatttttaattttttaaatttttaacgatttactgtggctagatacccaatctctctcaaatatttttttagcctcgcttacaagctgtttatctatactattaaaactgacgaatccgtgattttggtaatgggttccgtcgaaatttgccgaagtgatatgaacatattcgtcgtcgactatcaacaattttgtattattctgaatagtgaaaaccttcacagatagatcattttgaacacacaacgcatctagacttttggcggttgccatagaatatacgtcgttcttatcccaattaccaactagaagtctgatcttaactcctctattaatggctgcttctataatggagttgtaaatgtcgggccaatagtagctattaccgtcgacacgtgtagtgggaactatggccaaatgttcaatatctatactagtcttagctgacctgagtttatcaataactacatcggtatctagatctctagaatatcccaataggtgttccggagaatcagtaaagaacactccacctataggattcttaatatgatacgcagtgctaactggcaaacaacaagccgcagagcataaattcaaccatgaattttttgcgctattaaaggctttaaaagtatcaaatcttctacgaagatctgtggccagcgggggataatcagaatatacacctaacgttttaatcgtatgtatagatcctccagtaaatgacgcgtttcctacataacatctttcatcatctgacacccaaaaacaaccgagtagtagtcccacattattttttttatctatattaacggttataaaatttatatccgggcagtgactttgtagctctcccagatttcttttccctcgttcatctagcaaaactattattttaatccctttttcagatgcctcttttagtttatcaaaaataagcgctcccctagtcgtactcagaggattacaacaaaaagatgctatgtatatatatttcttagctagagtgataatttcgttaaaacattcaaatgttgttaaatgatcggatctaaaatccatattttctggtagtgtttctaccagcctacattttgctcccgcaggtaccgatgcaaatggccacatttagttaacataaaaacttatacatcctgttctatcaacgattctagaatatcatcggctatatcgctaaaattttcatcaaagtcgacatcacaacctaactcagtcaatatattaagaagttccatgatgtcatcttcgtctatttctatatccgtatccattgtagattgttgaccgattatcgagtttaaatcattactaatactcaatccttcagaatacaatctgtgtttcattgtaaatttataggcggtgtatttaagttggtagattttcaattatgtattaatatagcaacagtagttcttgctcctccttgattctagcatcctcttcattattttcttctacgtacataaacatgtccaatacgttagacaacacaccgacgatggcggccgctacagacacgaatatgactaaaccgatgaccatttaaaaacccctctctagctttcacttaaactgtatcgatcattcttttagcacatgtataatataaaaacattattctatttcgaatttaggcttccaaaaatttttcatccgtaaaccgataataatatatatagacttgttaatagtcggaataaatagattaatgcttaaactatcatcatctccacgattagagatacaatatttacattctttttgctgtttcgaaactttatcaatacacgttaatacaaacccaggaaggagatattgaaactgaggctgttgaaaatgaaacggtgaatacaataattcagataatgtaaaatcatgattccgtattctgatgatattagaactgctaatggatgtcgatggtatgtatctaggagtatctattttaacaaagcatcgatttgctaatatacaattatccttttgattaattgttattttattcatattcttaaaaggtttcatatttatcaattcttctacattaaaaatttccatttttaatttatgtagccccgcaatactcctcattacgtttcattttttgtctataatatccattttgttcatctcggtacatagattatccaattgagaagcgcatttagtagttttgtacattttaagtttattgacgaatcgtcgaaaactagttatagttaacattttattatttgataccctgatattaatacccctgccgttactattatttataactgatgtaatccacgtaacattggaattaactatcgatagtaatgcatcgacgcttccaaaattgtctattataaactcaccgataatttttttattgcatgttttcatattcattaggattatcaaatctttaatcttattacgattgtatgcgttgatattacaagacgtcattctaaaagacggaggatctccatcaaatgccagacaatcacgtacaaagtacatggaaataggttttgttctattgcgcatcatagatttatatagaacacccgtagaaatactaatttgttttactctataaaatactaatgcatctatttcatcgttttgtataacgtctttccaagtgtcaaattccaaatttttttcattgatagtaccaaattcttctatctctttaactacttgcatagataggtaattacagtgatgcctacatgccgttttttgaaactgaatagatgcgtctagaagcgatgctacgctagtcacaatcaccactttcatatttagaatatatatatgtaaaaatatagtagaatttcattttgtttttttctatgctataaatgaattctcattttgcatctgctcatactccgttttatattaataccaaagaaggaagatatctggttctaaaagccgttaaagtatgcgatgttagaactgtagaatgcgaaggaagtaaagcttcctgcgtactcaaagtagataaaccctcatcgcccgcgtgtgagagaagaccttcgtccccgtccagatgcgagagaatgaataaccctggaaaacaagttccgtttatgaggacggacatgctacaaaatatgttcgcggctaatcgcgataatgtagcttctagacttttgtcctaaaatactattatatccttttcgatattaataaatccgtgtcgtccaggttttttatctctttcagtatgtgaatagataggtattttatctctattcatcatcgaatttaagagatccgataaacattgtttgtattctccagatgtcagcatctgatacaacaatatatgtgcacataaacctctggcacttatttcatgtaccttccccttatcactaaggagaatagtatttgagaaatatgtatacatgatattatcatgaattagatatacagaatttgtaacactctcgaaatcacacgatgtgtcggcgttaagatctaatatatcactcgataacacattttcatctagatacactagacattttttaaagctaaaatagtctttagtagtaacagtaactatgcgattattttcatcgatgatacatttcatcggcatattattacgcttaccatcaaagactataccatgtgtatatctaacgtattctagcatggttgccatacgcgcattaaacttttcaggatctttggatagatcttccaatctatctatttgagaaaacatttttatcatgttcaatagttgaaacgtcggatccactatatagatattatctataaagattttaggaactacgttcatggtatcctggcgaatattaaaactatcaatgatatgattatcgttttcatcttttatcaccatatagtttctaagatatgggattttacttaatataatattatttcccgtgataaattttattagaaaggccaaatctataagaaaagtcctagaattagtctgaagaatatctatatcgccgtatagtatatttggattaattagatatagagaatatgatccgtaacatatacaacttttattatggcgtctaagatattcttccatcaacttattaacatttttgactagggaagatacattatgacgtcccattacttttgccttgtctattactgcgacgttcatagaatttagcatatctcttgccaattcttccattgatgttacattataagaaattttagatgaaattacatttggagctttaatagtaagaactcctaatatgtccgtgtatgtggtcactaatacagattgtagttctataatcgtaaataatttacctatattatatgtttgagtctgtttagaaaagtagctaagtatacgatcttttatttctgatgcagatgtatcaacatcggaaaaaaatctttttttattcttttttactaaagatacaaatatgtctttgttaaaaacagttattttctgaatatttctagcttgtaattttaacatatgatattcgttcacactaggtactctgcctaaataggtttctataatctttaatgtaatattaggaagagtattctgatcaggattcctattcattttgaggatttaaaactctgattattgtctaatatggtctctacgcaaactttttcacagagcgatagagtttttgataactcgtttttcttaagaaatataaaactactgtctccagagctcgctctatcttttattttatctaattcgatacaaactcctgatactggttcagaaagtaattcattaattttcagtcctttatagaagatatttaatatagataatacaaaatcttcagtttttgatatcgatctgattgatcctagaactagatatattaataacgtgctcattaggcagtttatggcagcttgataattagatatagtatattccagttcatatttattagataccgcattgcccagattttgatattctatgaattcctctgaaaataaatccaaaataactagacattctattttttgtggattagtgtactctcttccctctatcatgttcactactggtgtccacgatgataaatatctagagggaatataatatagtccataggatgccaatctagcaatgtcgaataactgtaattttattcttcgctcttcattatgaattgattcttgaggtataaacctaacacaaattatattattagacttttcgtatgtaatgtctttcatgttataagtttttaatcctggaatagaatctattttaatgaggcttttaaacgcagagttctccaacgagtcaaagcataatactctgttgtttttcttatatacgatgttacgattttcttctttgaatggaataggtttttgaattagtttataattacaacataatagataaggaagtgtgcaaatagtacgcggaaaaaacataatagctcccctgttttcatccatggttttaagtaaatgatcactggcttctttagtcaatggatattcgaacattaaccgtttcatcatcattggacagaatccatatttcttaatgtaaagagtgatcaaatcattgtgtttattgtaccatcttgttgtaaatgtgtattcggttatcggatctgctcctttttctattaaagtatcgatgtcaatctcgtctaagaattcaactatatcgacatatttcatttgtatacacataaccattactaacgtagaatgtataggaagagatgtaacgggaacagggtttgttgattcgcaaactattctaatacataattcttctgttaatacgtcttgcacgtaatctattatagatgccaagatatctatataattattttgtaagatgatgttaactatgtgatctatataagtagtgtaataattcatgtattttgatatatgttccaactctgtctttgtgatgtctagtttcgtaatatctatagcatcctcaaaaaatatattcgcatatattcccaagtcttcagttctatcttctaaaaaatcttcaacgtatggaatataataatctattttacctcttctgatatcattaatgatatagtttttgacactatcttctgtcaattgattcttattcactatatctaagaaacggatagcgtccctaggacgaactactgccattaatatctctattatagcttctggacataattcatctattataccagaattaatgggaactattccgtatctatctaacatagttttaagaaagtcagaatctaagacttgatgttcatatattggttcatacatgaaatgatctctattgatgatagtgactatttcattctctgaaaattggtaactcattctatatatgctttccttgttgatgaaggatagaatatactcaatagaatttgtaccaacaaactgttctcttatgaatcgtatatcatcatctgaaataatcatgtaaggcatacatttaacaattagagacttgtctcctgttatcaatatactattcttgtgataatttatgtgtgaggcaaatttgtccacgttctttaattttgttatagtagatatcaaatccaatggagctacagttcttggcttaaacagatatagtttttctggaacaaattctacaacattattataaaggactttgggtaaataagtgggatgaaatcctattttaattaatgcgatagccttgtcctcgtgcagatatccaaacgcttttgtgatagtatggcattcattgtctagaaacgctctacgaatatctgtgacagatatcatctttagagaatatactagtcgcgttaatagtactacaatttgtattttttaatctatctcaataaaaaaattaatatgtatgattcaatgtataactaaactactaactgttattgataactagaatcagaatctaatgatgacgtacccaagaagtttatctactgccaatttagctgcattatttttagcatctcgtttagattttccatctgccttatcgaatactcttccgtcgatatctacacaggcataaaatgtaggagagttactaggcccaactgattcaatacgaaaagaccaatctctcttagttatttggcagtactcattaataacggtgacagggttagcatctttccaatcaataatttttttagccggaataacatcatcaaaagacttatgatcctctctcattgatttttcgcgggatacatcatctattatgacgtcagccataacatcagcatccggcttatccgcctccgttgtcataaaccaacgaggaggaatatcgtcggagctgtacaccatagcactacgttgaagatcgtacagagctttattaacttctcgcttctccatattaagttgtctagttagttgtgcagcagtagctccttcgattccaatggttttaatagcctcacacacaatctctgcgttagaacgttcgtcgatatagattttagacatttttagagagaactaacacaaccagcaataaaactgaacctactttatcatttttttattcatcatcctctggtggttcgtcgttcctatcaaatgtagctctgattaacccgtcatctataggtgatgctggttctggagattctggaggagatggattattatctggaagaatctctgttatttccttgttttcatgtatcgattgcgttgtaacattaagattgcgaaatgctctaaatttgggaggcttaaagtgttgtttgcaatctctacacgcgtgtctaactagtggaggttcgtcagctgctctagtttgaatcatcatcggcgtagtattcctacttttacagttaggacacggtgtattgtatttctcgtcgagaacgttaaaataatcgttgtaactcacatcctttattttatctatattgtattctactcctttcttaatgcattttataccgaataagagatagcgaaggaattctttttcggtgccgctagtacccttaatcatatcacatagtgttttatattccaaatttgtggcaatagacggtttatttctatacgatagtttgtttctggaatcctttgagtattctataccaatattattctttgattcgaatttagtttcttcgatattagattttgtattacctatattcttgatgtagtactttgatgatttttccatggcccattctattaagtcttccaagttggcatcatccacatattgtgatagtaattctcggatatcagtagcggctaccgccattgatgtttgttcattggatgagtaactactaatgtatacattttccatttataacacttatgtattaactttgttcatttatattttttcattattatgttgatattaacaaaagtgaatatatatatatgttaataattgtattgtggttatacggctacaattttataatgagtgaaagtcagtgtccgatgatcaatgacgatagctttactctgaaaagaaagtatcaaatcgatagtgcggagtcaacaataaaaatggataagaagaggataaagtttcagaatagagccaaaatggtaaaagaaataaatcagacaataagagcagcacaaactcattacgagacattgaaactaggatacataaaatttaagagaatgattaggactactactctagaagatatagcaccatctattccaaataatcagaaaacttataaactattctcggacatttcagccatcggcaaagcatcacagaatccgagtaagatggtatatgctctgctgctttacatgtttcccaatttgtttggagatgatcatagattcattcgttatagaatgcatccaatgagtaaaatcaaacacaagatcttctctcctttcaaacttaatcttattagaatattagtggaagaaagattctataataatgaatgcagatctaataaatggaaaataattggaacacaagttgataaaatgttgatagctgaatctgataaatatacaatagatgcaaggtataacctaaaacccatgtatagaatcaagggagaatctgaagaagataccctcttcatcaaacagatggtagaacaatgtgtgacatcccaggaattggtggaaaaagtgttgaagatactgtttagagatttgttcaagagtggagaatacaaagcgtacagatacgatgatgatgtagaaaatggattcattggattggatacactaaaattaaacattgttcatgatatagttgaaccatgtatgcctgttcgtaggccagtggctaagatactgtgtaaagaaatggtaaataaatactttgagaatccgctacatattattggtaaaaatcttcaagagtgcattgactttgttagtgaataggcatttcatctttctccaatactaattcaaattgttaaattaataatggatagtataaatagttattagttataagatagtaaaaataattattagaataagagtgtagtatcatagataactctcttctataaaaatggattttattcgtagaaagtatcttatatacacagtagaaaataatatagattttttaaaggatgatacattaagtaaagtaaacaattttaccctcaatcatgtactagctctcaagtatctagttagcaattttcctcaacatgttattactaaggatgtattagctaataccaatttttttgttttcatacatatggtacgatgttgtaaagtgtacgaagcggttttacgacacgcatttgatgcacccacgttgtacgttaaagcattgactaagaattatttatcgtttagtaacgcaatacaatcgtacaaggaaaccgtgcataaactaacacaagatgaaaaatttttagaggttgccgaatacatggacgaattaggagaacttataggcgtaaattatgacttagttcttaatccattatttcacggaggggaacccatcaaagatatggaaatcatttttttaaaactgtttaagaaaacagacttcaaagttgttaaaaaattaagtgttataagattacttatttgggcatacctaagcaagaaagatacaggcatagagtttgcggataatgatagacaagatatatatactctatttcaacaaactggtagaatcgtccatagcaatctaacagaaacgtttagagattatatctttcccggagataagactagctattgggtgtggttaaacgaaagtatagctaatgatgcggatatcgttcttaatagacccgccattaccatgtatgataaaattcttagttatatatactctgagataaaacaaggacgcgttaataaaaacatgcttaagttagtttatatctttgagcctgaaaaagatatcagagaacttctgctagaaatcatatatgatattcctggagatatcctatctattattgatgcaaaaaacgacgattggaaaaaatattttattagtttttataaagctaattttattaacggtaatacatttattagtgatagaacgtttaacgaggacttattcagagttgttgttcaaatagatcccgaatatttcgataatgaacgaattatgtctttattctctacgagtgctgcggacattaaacgatttgatgagttagatattaataacagttatatatctaatataatttatgaggtgaacgatatcacattagatacaatggatgatatgaagaagtgtcaaatctttaacgaggatacgtcgtattatgttaaggaatacaatacatacctgtttttgcacgagtcggatcccatggtcatagagaacggaatactaaagaaactgtcatctataaaatccaagagtagacggctgaacttgtttagcaaaaacattttaaaatattatttagacggacaattggctcgtctaggtcttgtgttagatgattataaaggagacttgttagttaaaatgataaaccatcttaagtctgtggaggatgtatccgcattcgttcgattttctacagataaaaaccctagtattcttccatcgctaatcaaaactattttagctagttataatatttccatcatcgtcttatttcaaaggtttttgagagataatctatatcatgtagaagaattcttggataaaagcatccatctaaccaagacggataagaaatatatacttcaattgataagacacggtagatcatagaacagaccaaatatattattaataatttgtatatacatagatataattatcacacatttttgataaatgggaactgctgcaacaattcagactcccaccaaattaatgaataaagaaaatgcagaaatgattttggaaaaaattgttgatcatatagttatgtatattagtgacgaatcaagtgattcagaaaataatcctgaatatattgattttcgtaacagatacgaagactatagatctctcattataaaaagtgatcacgagtttgtaaagctatgtaaaaatcatgcggagaaaagttctccagaaacgcaacaaatgattatcaaacacatatacgaacaatatcttattccagtatctgaagtactattaaaacctataatgtccatgggtgacataattacatataacggatgtaaagacaatgaatggatgctagaacaactctctaccctaaactttaacaatctccgcacatggaactcatgtagcataggcaatgtaacgcgtctgttttatacattttttagttatctgatgaaagataaactaaatatataagtataatcccattctaatactttaacctgatgtattacctgcatcttattagaatattaacctaactaaaagacataacataaaaactcattacatagttgataaaaagcggtaggatataaatattatggctgccaccgttccgcgttttgacgacgtgtacaaaaatgcacaaagaagaattctagatcaagaaacattttttagtagaggtctaagtagaccgttaatgaaaaacacatatctatttgataattacgcgtatggatggataccagaaactgcaatttggagtagtagatacgcaaacttagatgcaagtgactattatcccatttcgttgggattacttaaaaagttcgagtttctcatgtctctatataaaggtcctattccagtatacgaagaaaaagtaaatactgaattcattgctaatggatctttctccggtagatacgtatcatatcttagaaagttttctgctcttccaacaaacgagtttattagttttttgttactgacttccattccaatctataatatcttgttctggtttaaaaatactcagtttgatattactaaacacacattattcagatacgtctatacagataatgccaaacacctggcgttggctaggtatatgtatcaaacaggagactataagcctttgtttagtcgtctcaaagagaattatatatttaccggtcccgttccaatatgtatcaaagatatagatcaccctaatcttagtagagcaagaagtccatccgattatgagacattagctaatattagtactatattgtactttaccaagtatgatccggtattaatgtttttattgttttacgtacctgggtattcaattactacaaaaattactccagccgtagaatatctaatggataaactgaatctaacaaagagcgacgtacaactgttgtaaattattttatgcttcgtaaaatgtaggttttgaaccaaacattctttcaaagaatgagatgcataaaactttattatccaatagattgactatttcggacgtcaatcgtttaaagtaaacttcgtaaaatattctttgatcactgccgagtttaaaacttctatcgataattgtttcatatgttttaatatttacaagttttttggtccatggtccattaggacaaatatatgcaaaataatatcgttctccaagttctatagtctctggattatttttattatattcagtaaccaaatacatattagggttatctgcggatttataatttgagtgatgcattcgactcaacataaataattctagaggagacgatctactatcaaattcggatcgtaaatctgtttctaaagaacggagaatatctatacatacctgattagaattcatccgtccttcagacaacatctcagacagtctggttttgtacatcttaatcatattcttatgaaacttggaaacatctcttctagtttcactagtacctttattaattctctcaggtacagattttgaattcgacgatgccgagtatttcatcgttgtatatttcttcttcgattgcataatcagattcttatataccgcctcaaactctattttaaaattattaaacaatactctattattaatcagtcgttctaactctttcgctatttctatagacttatctacatcttgactgtctatctctgtaaacacggagtcggtatctccatacacgctacgaaaacgaaatctgtaatctataggcaacgatgttttcacaatcggattaatatctctatcgtccatataaaatggattacttaatggattggcaaaccgtaacataccgttagataactctgctccatttagtaccgattctagatacaagatcattctacgtcctatggatgtgcaactcttagccgaagcgtatgagtatagagcactatttctaaatcccatcagaccatatactgagttggctactatcttgtacgtatattgcatggaatcatagatggccttttcagttgaactggtagcctgttttagcatctttttatatctggctctctctgccaaaaatgttcttaatagtctaggaatggttccttctatcgatctatcgaaaattgctatttcagagatgaggttcggtagtctaggttcacaatgaaccgtaatatatctaggaggtggatatttctgaagcaatagctgattatttatttcttcttccaatctattggtactaacaacgacaccgactaatgtttccggagatagatttccaaagatacacacattaggatacagactgttataatcaaagattaatacattattactaaacattttttgttttggagcaaataccttaccgccttcataaggaaacttttgttttgtttctgatctaactaagatagttttagtttccaacaatagctttaacagtggacccttgatgactgtactcgctctatattcgaataccatggattgaggaagcacatatgttgacgcacccgcgtctgtttttgtttctactccataatactcccacaaatactgacacaaacaagcatcatgaatacagtatctagccatatctaaagctatgtttagattataatccttatacatctgagctaaatcaacgtcatcctttccgaaagataatttatatgtatcattaggtaaagtaggacataatagtacgactttaaatccattttcccaaatatctttacgaattactttacatataatatcctcatcaacagtcacataattacctgtggttaaaacctttgcaaatgcagcggctttgcctttcgcgtctgtagtatcgtcaccgatgaacgtcatttctctaactcctctatttaatactttacccatgcaactgaacgcgttcttggatatagaatccaatttgtacgaatccaatttttcaaatttttgaatgaatgaatatagatcgaaaaatatagttccattattgttattaacgtgaaacgtagtattggccatgccgcctactcccttatgactagactgatttctctcataaatacagagatgtacagcttcctttttgtccggagatctaaagataattttctctcctgttaataactctagacgattagtaatatatctcagatcaaagttatgtccgttaaaggtaacgacgtagtcgaacgttagttccaacaattgtttagctattcgtaacaaaactatttcagaacatagaactagttctcgttcgtaatccatttccattagtgactgtatcctcaaacatcctctatcgacggcttcttgtatttcctgttccgttaacatctcttcattaatgagcgtaaacaataatcgtttaccacttaaatcgatataacagtaacttgtatgcgagattgggttaataaatacagaaggaaacttcttatcgaagtgacactctatatctagaaataagtacgatcttgggatatcgaatctaggtatttttttagcgaaacagttacgtggatcgtcacaatgataacatccattgttaatctttgtcaaatattgctcgtccaacgagtaacatccgtctggagatatcccgttagaaatataaaaccaactaatattgagaaattcatccatggtggcattttgtatgctgcgtttctttggctcttctatcaaccacatatctgcgacggagcattttctatctttaatatctagattataacttattgtctcgtcaatgtctatagttctcatctttcccaacggcctcgcattaaatggaggaggagacaatgactgatatatttcgtccgtcactacgtaataaaagtaatgaggaaatcgtataaatacggtctcaccatttcgacatctggatttcagatataaaaatctgttttcaccgtgactttcaaaccaattaatgcaccgaacatccatttatagaatttagaaatatattttcatttaaatgaatcccaaacattggggaagagccgtatggaccattatttttatagtactttcgcaagcgggtttagacggcaacatagaagcgtgtaaacgaaaactatatactatagttagcactcttccatgtcctgcatgtagacggcacgcgactatcgctatagaggacaataatgtcatgtctagcgatgatctgaattatatttattattttttcatcagattatttaacaatttggcatctgatcccaaatacgcgatcgatgtgacaaaggttaaccctttataaacttaacccattataaaacttatgattagtcacaactgaaataaccgcgtgattattttttggtataattctacacggcatggtttctgtgactatgaattcaacccccgttacattagtgaaatctttaacaaacagcaagggttcgtcaaagacataaaactcattgtttacaatcgaaatagaccccctatcacacttaaaataaaaaatatccttatcctttaccaccaaataaaattctgattggtcaatgtgaatgtattcacttaacagttccacaaatttatttattaactccgaggcacatacatcgtcggtattttttatggcaaactttactcttccagcatccgtttctaaaaaaatattaacgagttccatttatatcatccaatattattgaaatgacgttgatggacagatgatacaaataagaaggtacggtacctttgtccaccatctcctccaattcatgctctattttgtcattaactttaatgtatgaaaacagtacgccacatgcttccatgacagtgtgtaacactttggatacaaaatgtttgacattagtataattgttcaagactgtcaatctataatagatagtagctataatatattctatgatggtattgaagaagatgacaaccttggcatattgatcatttaacacagacatggtatcaacagatagcttgaatgaaagagaatcagtaattggaataagcgtcttctcgatagagtgtccgtataccaacatgtctgatattttgatgtattccattaaattatttagttttttctttttattctcgttaaacagcatttctgtcaacggaccccaacatcgttgaccgattaagttttgattgatttttccgtgtaaggcgtatctagtcagatcgtatagcctatccaataatccatcatctgtgcgtagatcacatcgtacactttttaattctctatagaagagcgacagacatctggagcaattacagacagcaatttctttattctctacagatgtaagatacttgaagacattcctatgatgatgcagaattttggataacacggtattgatggtatctgttaccataattcctttgatggctgatagtgtcagagcacaagatttccaatctttgacaatttttagcaccattatctttgttttgatatctatatcagacagcatggtgcgtctgacaacacagggattaagacggaaagatgaaatgattctctcaacatcttcaatagataccttgctattttttctggcattatctatatgtgcgagaatatcctctagagaatcagtatcctttttgatgatagtggatctcaatgacatgggacgtctaaaccttcttattctatcaccagattgcatggtgatttgtcttctttcttttatcataatgtaatctctaaattcatcggcaaattgtctatatctaaaatcataatatgagatgtttacctctacaaatatctgttcgtccaatgttaaagtatttacatcagttttgtattccaaattaaacatggcaacggatttaattttatattcctctattaagtcctcgtcgataataacagaatgtagataatcatttaatccatcgtacatggttggaagatgcttgttgacaaaatctttaattgtcttgatgaaggtgggactatatctaacatcttgattaataaaatttataacattgtccataggatactttgtaactagttttatacacatctcttcatcggtaagtttagacagaatatcgtgaacaggtggtatattatattcatcagatatacgaagaacaatgtccaaatctatattgtttaatatattatatagatgtagcgtagctcctacaggaatatctttaactaagtcaatgatttcatcaaccgttagatctattttaaagttaatcatataggcattgatttttaaaaggtatgtagccttgactacattctcattaattaaccattccaagtcactgtgtgtaagaagattatattctatcataagcttgactacatttggtcccgataccattaaagaattcttatgatataaggaaacagattttaggtactcatctactctacaagaattttggagagccttaacgatatcagtgacgtttattatttcaggaggaaaaaacctaacattgagaatatcggaattaatagcttccagatacagtgattttggcaatagtccgtgtaatccataatccagtaacacgagctggtgcttgctagacaccttttcaatgtttaatttttttgaaataagctttgataaagccttcctcgcaaattccggatacatgaacatgttggcgacatgattaagtattgttttttcattatttttatattttctcaacaagttctcaataccccaatagatgatagaatatcacccaatgcgtccatgttgtctatttccaacaggtcgctatatccaccaatagaagtttttccaaaaaagattctaggaacagttctaccaccagtaatttgttcaaaatagtcacgcaattcattttcgggtttaaattctttaatatcgacaatttcatacgctcctcttttgaaactaaacttatttagaatatccagtgcatttctacaaaaaggacatgtatacttgacaaaaattgtcactttgttattggccaacctttgttgtacaaattcctcggccattttaatatttaagtgatataaaactatctcgacttatttaactctttagtcgagatatatggacgcagatagctatatgatagccaactacagaaggcaaacgctataaaaaacataattacgacgagcatatttataaatatttttattcagcattacttgatatagtaatattaggcacagtcaaacattcaaccactctcgatacattaactctctcattttctttaacaaattctgcaatatcttcgtaaaaagattcttgaaactttttagaatatctatcgactctagatgaaatagcgttcgtcaacatactatgttttgtatacataaaggcgcccattttaacagtttctagtgacaaaatgctagcgatcctaggatcctttagaatcacatagattgacgattcgtctctcttagtaactctagtaaaataatcatacaatctagtacgcgaaataatattatccttgacttgaggagatctaaacaatctagttttgagaacatcgataagttcatcgggaatgacatacatactatctttaatagaactcttttcatccagttgaatggattcgtccttaaccaactgattaatgagatcttctattttatcattttccagatgatatgtatgtccattaaagttaaattgtgtagcgcttctttttagtctagcagccaatactttaacatcactaatatcgatatacaaaggagatgatttatctatggtattaagaattcgtttttcgacatccgtcaaaaccaattcctttttgcctgtatcatccagttttccatcctttgtaaagaaattattttctactagactattaataagactgataaggattcctccataattgcacaatccaaactttttcacaaaactagactttacaagatctacaggaatgcgtacttcaggttttttagcttgtgattttttcttttgcggacattttcttgtgaccaactcatctaccatttcattgattttagcagtgaaataagctttcaatgcacgggcactgatactattgaaaacgagttgatcttcaaattccgccatttaagttcaccaaacaacttttaaatacaaatatatcaatagtagtagaataagaactataaaaaaataataattaaccaataccaaccccaacaaccggtattattagttgatgtgactgttttctcatcacttagaacagatttaacaatttctataaagtctgtcaaatcatcttccggagaccccataaatacaccaaatatagcggcgtacaacttatccatttatacattgaatattggcttttctttatcgctatcttcatcatattcatcatcaatatcaacaagtcccagattacgagccagatcttcttctacattttcagtcattgatacacgttcactatctccagagagtccgataacgttagccaccacttctctatcaatgattagtttcttgagcgcgaaagtaatttttgtttccgttccggatctatagaagacgataggtgtgataattgccttggccaattgtctttctcttttactgagtgattctagttcaccttctatagatctgagaatggatgattctccagtcgaaacatattctaccatggatccgtttaatttgttgatgaagatggattcatccttaaatgttttctctgtaatagtttccaccgaaagactatgcaaagaatttggaatgcgttccttgtgcttaatgtttccatagacggcttctagaagttgatacaacataggactagccgcggtaacttttatttttagaaagtatccatcgcttctatcttgtttagatttatttttataaagtttagtctctccttccaacataataaaagtggaagtcatttgactagataaactatcagtaagttttatagagatagacgaacaattagcgtattgagaagcatttagtgtaacgtattcgatacattttgcattagatttactaatcgattttgcatactctataacacccgcacaagtctgtagagaatcgctagatgcagtaggtcttggtgaagtttcaactctcttcttgattaccttactcatgattaaacctaaataattgtactttgtaatataatgatatatattttcactttatctcatttgagaataaaaatgtttttgtttaaccactgcatgatgtacagatttcggaatcgcaaaccaccagtggttttattttatccttgtccaatgtgaattgaatgggagcggatgcgggtttcgtacgtagatagtacattcccgtttttagaccgagactccatccgtaaaaatgcatactcgttagtttggaataactcggatctgctatatggatattcatagattgactttgatcgatgaaggctcccctgtctgcagccatttttatgatcgtcttttgtggaatttcccaaatagttttataaactcgcttaatatcttctggaaggtttgtattctgaatggatccaccatctgccataatcctattcttgatctcatcattccataattttctctcggttaaaactctaaggagatgcggattaactacttgaaattctccagacaatactctccgagtgtaaatattactggtatacggttccaccgactcattatttcccaaaatttgagcagttgatgcagtcggcataggtgccaccaataaactatttctaagaccgtatgttctgattttatcttttagaggttcccaattccaaagatccgacggtacaacattccaaagatcatattgtagaataccgttactggcgtacgatcctacatatgtatcgtatggtccttccttctcagctagttcacaactcgcctctaatgcaccgtaataaatggtttcgaagatcttcttatttagatcttgtgcttccaggctatcaaatggataatttaagagaataaacgcgtccgctaatccttgaacaccaataccgataggtctatgtctcttattagagatttcagcttctggaataggataataattaatatctataattttattgagatttctgacaattactttgaccacatccttcagtttgagaaaatcaaatcgcccatctattacaaacatgttcaaggcaacagatgccagattacaaacggctacctcattagcatccgcatattgtattatctcagtgcaaagattactacacttgatagttcctaaattttgttgattactctttttgttacacgcatccttataaagaatgaatggagtaccagtttcaatctgagattctataatcgctttccagacgactcgagcctttattatagatttgtatctcctttctctttcgtatagtgtatacaatcgttcgaactcgtctccccaaacattgtccaatccaggacattcatccggacacatcaacgaccactctccgtcatccttcactcgtttcataaagagatcaggaatccaaagagctataaatagatctctggttctatgttcctcgtttcctgtattctttttaagatcgaggaacgccataatatcagaatgccacggttccaagtatatggccataactccaggccgtttgtttcctccctgatctatgtatctagcggtgttattataaactctcaacattggaataataccgtttgatataccattggtaccggagatatagcttccactggcacgaatattactaattgatagacctattccccctgccattttagagattaatgcgcatcgttttaacgtgtcatagataccctctatgctatcatcgatcatgttaagtagaaaacagctagacatttggtgacgactagttcccgcattaaataaggtaggagaagcgtgcgtaaaccatttttcagaaagtagattgtacgtctcaatagctgagtctatatcccattgatgaattcctactgcgacacgcattaacatgtgctgaggtctttcaacgatcttgttgtttattttcaacaagtaggatttttccaaagttttaaaaccaaaatagttgtatgaaaagtctcgttcgtaaataataaccgagttgagtttatccttatatttgttaactatatccatggtgatacttgaaataatcggagaatgtttcccatttttaggattaacatagttgaataaatcctccatcacttcactaaatagtttttttgtttccttgtgtagatttgatacggctattctggcggctagaatggcataatccggatgttgtgtagtacaagtggctgctatttcggctgccagagtgtccaattctaccgttgttactccattatatattccttgaataaccttcatagctattttaataggatctatatgatccgtgtttaagccataacataattttctaatacgagacgtgattttatcaaacatgacattttccttgtatccatttcgtttaatgacaaacatttttgttggtgtaataaaaaaattatttaacttttcattaatagggatttgacgtatgtagcgtacaaaatgatcgttcctggtatatagataaagagtcctatatatttgaaaatcgttacggctcgattaaactttaatgattgcatagtgaatatatcattaggatttaactccttgactatcatggcggcgccagaaattaccatcaaaagcattaatacagttatgccgatcgcagttaaaacggttatagcatccaccatttatatctaaaaattagatcaaagaatatgtgacaaagtcctagttgtatactgagaattgacgaaacaatgtttcttacatatttttttcttattagtaactgacttaatagtaggaactggaaagctagacttgattattctataagtatagatacccttccagataatgttctctttgataaaagttccagaaaatgtagaattttttaaaaagttatcttttgctattaccaagattgtgtttagacgcttattattaatatgagtgatgaaatccacaccgcctctagatatcgcctttatttccacattagatggtaaatccaatagtgaaactatctttttaggaatgtatggactcgcgtttagaggagtgaacgtcttgggcgtcggaaaggatgattcgtcaaacgaataaacaatttcacaaatggatgttaatgtattagtaggaaattttttgacgctagtggaattgaagattctaatggatgatgttctacctatttcatccgataacatgttaatttccgacaccaacggttttaatatttcgatgatatacggtagtctctctttcggacttatatagcttattccacaatacgagtcattatatactccaaaaaacaaaataactagtataaaatctgtatcgaatgggaaaaacgaaattatcgacataggtatagaatccggaacattgaacgtattaatacttaattctttttctgtggtaagtaccgataggttattgacattgtatggttttaaatattctataacttgagacttgatagatattagtgatgaattgaaaattatttttatcaccacgtgtgtttcaggatcatcgtcgacgcccgtcaaccaaccgaatggagtaaaataaatatcattaatatatgctctagatattagtatttttattaatcctttgattatcatcttctcgtaggcgaatgattccatgatcaagagtgatttgagaacatcctccggagtattaatgggcttagtaaacagtccatcgttgcaataataaaagttatccaagttaaaggatattatgcattcgtttaaagatatcacctcatctgacggagacaattttttggtaggttttagagactttgaagctacttgtttaacaaagttattcatcgtcgtctactattctatttaattttgtagttaatttatcacatatcacattaattgactttttggtccatttttccatacgtttatattcttttaatcctgcgttatccgtttccgttatatccagggatagatcttgcaagttaaatagaatgctcttaaataatgtcattttcttatccgctaaaaatttaaagaatgtataaacctttttcagagatttgaaactcttaggtggtgtcctagtacacaatatcataaacaaactaataaacattccacattcagattccaacagctgattaacttccacattaatacagcctattttcgctccaaatgtacattcgaaaaatctgaataaaacatcgatgtcacaatttgtattatccaatacagaatgtttgtgattcgtgttaaaaccatcggagaaggaatagaaataaaaattattatagtggtggaattcagttggaatattgcctccggagtcataaaaggatactaaacattgttttttatcataaattacacatttccaatgagacaaataacaaaatccaaacattacaaatctagaggtagaacttttaattttgtctttaagtatatacgataagatatgtttattcataaacgcgtcaaatttttcatgaatcgctaaggagtttaagaatctcatgtcaaattgtcctatataatccacttcggatccataagcaaactgagagactaagttcttaatacttcgattgctcatccaggctcctctctcaggctctattttcatcttgacgacctttggattttcaccagtatgtattcctttacgtgataaatcatcgattttcaaatccatttgtgagaagtctatcgccttagatactttttcccgtagtcgaggtttaaaaaaatacgctaacggtatactagtaggtaactcaaagacatcatatatagaatggtaacgcgtctttaactcgtcggttaactctttcttttgatcgagttcgtcgctactattgggtctgctcaggtgccccgactctactagttccaacatcataccgataggaatacaagacactttgccggcggttgtagatttatcatatttttccactacatatccgttacaatttgttaaaaatttagatacatctatattgctacataatccagctagtgaatatatatgacataataaattggtaaatcctagttctggtattttactaattactaaatctgtatatctttccatttatcatggaaaagaatttaccagatatcttcttttttccaaactgcgttaatgtattctcttacaaatattcacaagatgaattcagtaatatgagtaaaacggaacgtgatagtttctcattggccgtgtttccagttataaaacatagatggcataacgcacacgttgtaaaacataaaggaatatacaaagttagtacagaagcacgtggaaaaaaagtatctcctccatcactaggaaaacccgcacacataaacctaaccgcgaagcaatatatatacagtgaacacacaataagctttgaatgttatagttttctaaaatgtataacaaatacagaaatcaattcgttcgatgagtatatattaagaggactattagaagctggtaatagtttacagatattttccaattccgtaggtaaacgaacagatactataggtgtactagggaataagtatccatttagcaaaattccattggcctcattaactcctaaagcacaacgagagatattttcagcgtggatttctcatagacctgtagttttaactggaggaactggagtgggtaagacgtcacaggtacccaagttattgctttggtttaattatttatttggtggattctctactctagataaaatcactgactttcacgaaagaccagtcattctatctcttcctaggatagctttagttagattgcatagcaataccattttaaaatcattgggatttaaggtactagatggatctcctatttctttacggtacggatctataccggaagaattaataaacaaacaaccaaaaaaatatggaattgtattttctacccataagttatctctaacaaaactatttagttatggcactcttattatagacgaagttcatgagcatgatcaaataggagatattattatagcagtagcgagaaagcatcatacgaaaatagattctatgtttttaatgactgccacgttagaggatgacagggaacggctaaaagtatttttacctaatcccgcatttatacatattcctggagatacactgtttaaaattagcgaggtatttattcataataagataaatccatcttccagaatggcatacatagaagaagaaaagagaaatttagttactgctatacagatgtatactcctcctgatggatcatccggtatagtctttgtggcatccgttgcacagtgtcacgaatataaatcatatttagaaaaaagattaccgtatgatatgtatattattcatggtaaggtcttagatatagacgaaatattagaaaaagtgtattcatcacctaatgtatcgataattatttctactccttatttggaatccagcgttactatacgcaatgttacacacatttatgatatgggtagagtttttgtccccgctccttttggaggatcgcaacaatttatttctaaatctatgagagatcaacgaaaaggaagagtaggaagagttaatcctggtacatacgtctatttctatgatctgtcttatatgaagtctatacagcgaatagattcagaatttctacataattatatattgtacgctaataagtttaatctaacactccccgaagatttgtttataatccctacaaatttggatattctatggcgtacaaaggaatatatagactcgttcgatattagtacagaaacatggaataaattattatccaattattatatgaagatgatagagtatgctaaactttatgtactaagtcctattctcgctgaggagttggataactttgagaggacgggagaattaactagtattgtacgagaagccattttatctctaaatttacaaattaagattttaaattttaaacataaagatgatgatacgtatatacacttttgtaaaatattattcggtgtctataacggaacaaacgctactatatattatcatagacctctaacgggatatatgaatatgatttcagatactatatttgttcctgtagataataactaaaaattaaactctaatgaccacatctttttttagagatgaaaaattttccacatctccttttgtagacacgactaaacattttgcagaaaaaagtttattagtgtttagataatcgtatacttcatcagtgtagatagtaaatgtgaacagataaaaggtattcttgctcaatagattggtaaattccatagaatatattaatcctttcttcttgagatcccacatcatttcaaccagagacgttttatccaatgatttacctcgtactataccacatacaaaactagattttgcagtgacgtcgtacctggtattcctaccaaacaaaattttacttttagttcttttagaaaattctaaggtagaatctctatttgccaatatgtcatctatggaattaccactagcaaaaaatgatagaaatatatattgatacatcgcagctggttttgatctactatactttaaaaacgaatcagattccataattgcctgtatatcatcagctgaaaaactatgttttacacgtattccttcggcatttctttttaatgatatatcttgtttagacaatgataaagttatcatgtccatgagagacgcgtctccgtatcgtataaatatttcattagatgttagacgcttcattaggggtatacttctataaggtttcttaatcagtccatcattggttgcgtcaagaactactatcggatgttgttgggtatctctagtgttacacatggccttactaaagtttgggtaaataactatgatatctctattaattatagatgcatatatttcattcgtcaaggatattagtatcgacttgctatcgtcattaatacgtgtaatgtaatcatataaatcatgcgatagccaaggaaaatttaaatagatgttcatcatataatcgtcgctataattcatattaatacgttgacattgactaatttgtaatatagcctcgccacgaagaaagctctcgtattcagtttcatcgataaaggataccgttaaatataactggttgccgatagtctcatagtctattaagtggtaagtttcgtacaaatacagaatccctaaaatattatctaatgttggattaatctttaccataactgtataaaatggagacggagtcataactattttaccgtttgtacttactggaatagatgaaggaataatctccggacatgctggtaaagacccaaatgtctgtttgaagaaatccaatgttccaggtcctaatctcttaacaaaaattacgatattcgatcccgatatcctttgcattctatttaccagcatatcacgaactatattaagattatctatcatgtctattctcccaccgttatataaatcgcctccgctaagaaacgttagtatatccatacaatggaatacttcatttctaaaatagtattcgttttctaattctttaatgtgaaatcgtatactagaaagggaaaaattatctttgagttttccgttagaaaagaaccacgaaactaatgttctgattgcgtccgattccgttgctgaattaatggatttacaccaaaaactcatataacttctagatgtagaagcattcgctaaaaaattagtagaatcaaaggatataagtagatgttccaacaagtgagcaattcccaagatttcatctatatcattctcgaatccgaaattagaaattcccaagtagatatcctttttcatccgatcgttgatgaaaatacgaactttattcggtaagacaatcatttactaaggagtaaaataggaagtaatgttcgtatgtcgttatcatcgtataaattaaaggtgtgttttttaccattaagtgacattataattttaccaatattggaattataatataggtgtatttgcgcactcgcgacggttgatgcatcggtaaatatagctgtatctaatgttctagtcggtatttcatcatttcgctgtctaataatagcgttttctctatctgtttccattacagctgcctgaagtttattggtcggataatatgtaaaataataagaaatacatacgaataacaaaaataaaataagatataataaagatgccatttagagatctaattttgtttaacttgtccaaattcctacttacagaagatgaggaatcgttggagatagtgtcttccttatgtagaggatttgaaatatcttataatgacttgataacttactttccagataggaaataccataaatatatttataaagtatttgaacatgtagatttatcggaggaattaagtatggaattccatgatacaactctgagagatttagtctatcttagattgtacaagtattccaagtgtatacggccgtgttataaattaggagataatctaaaaggcatagttgttataaaggacaggaatatttatattagggaagcaaatgatgacttgatagaatatctcctcaaggaatacactcctcagatttatacatattctaatgagcgcgtccccataactggttcaaaattaattctttgtggattttctcaagttacatttatggcgtatacaacgtcgcatataacaacaaataaaaaggtagatgttctcgtttccaaaaaatgtatagatgaactagtcgatccaataaattatcaaatacttcaaaatttatttgataaaggaagcggaacaataaacaaaatactcaggaagatattttattcggtaacaggtggccaaactccataggtagctttttctatttcggattttagaatttccaaattcaccagcgatttatcggttttggtgaaatccaaggatttattaatgtccacaaatgccatttgttttgtctgtggattgtatttgaaaatggaaacgatgtagttagatagatgcgctgcgaagtttcctattagggttccgcgcttcacgtcacccagcatacttgaatcaccatcctttaaaaaaaatgataagatatcaacatggagtatatcatactcggattttaattcttctactgcatcactgacattttcacaaatactacaatacggtttaccgaaaataatcagtacgttcttcatttatgggtatcaaaaacttaaaatcgttactgctggaaaataaatcactgacgatattagatgataatttatacaaagtatacaatggaatatttgtggatacaatgagtatttatatagccgtcgccaattgtgtcagaaacttagaagagttaactacggtattcataaaatacgtaaacggatgggtaaaaaagggagggcatgtaaccctttttatcgatagaggaagtataaaaattaaacaagacgttagagacaagagacgtaaatattctaaattaaccaaggacagaaaaatgttagaattagaaaagtgtacatccgaaatacaaaatgttaccggatttatggaagaagaaataaaggcagaaatgcaattaaaaatcgataaactcacatttcaaatatatttatctgattctgataacataaaaatatcattgaatgagatactaacacatttcaacaataatgagaatgttacattattttattgtgatgaacgagacgcagaattcgttatgtgtctcgaggctaaaacacatttctctaccacaggagaatggccgttgataataagtaccgatcaggatactatgctatttgcatctgctgataatcatcctaagatgataaaaaacttaactcaactgtttaaatttgttccctcggcagaggataactatttagcaaaattaacggcgttagtgaatggatgtgatttctttcctggactctatggggcatctataacacccaccaacttaaacaaaatacaattgtttagtgattttacaatcgataatatagtcactagtttggcaattaaaaattattatagaaagactaactctaccgtagacgtgcgtaatattgttacgtttataaacgattacgctaatttagacgatgtctactcgtatgttcctccttgtcaatgcactgttcaagaatttatattttccgcattagatgaaaaatggaatgaatttaaatcatcttatttagaaagcgttccgttaccctgccaattaatgtacgcgttagaaccacgtaaggagattgatgtttcagaagttaaaactttatcatcttatatagatttcgaaaatactaaatcagatatcgatgttataaaatctatatcctcgatcttcggatattctaacgaaaactgtaacacgatagtattcggcatctataaggataatttactactgagtataaataattcattttactttaacgatagtctgttaataaccaatactaaaagtgataatataataaatataggttactagattaaaaatggtgttccaactcgtgtgctctacgtgcggcaaagatatttctcacgaacgatataaattgattatacgaaaaaaatcattaaaggatgtactcgtcagtgtaaagaacgaatgttgtaggttaaaattatctacacaaatagaacctcaacgtaacttaacagtgcaacctctattggatataaactaatatggatccggttaattttatcaagacatatgcgcctagaggttctattatttttattaattataccatgtcattaacaagtcatttgaatccatcgatagaaaaacatgtgggtatttattatggtacgttattatcggaacacttggtagttgaatctacctatagaaaaggagttcgaatagtcccattggatagtttttttgaaggatatcttagtgcaaaagtatacatgttagagaatattcaagttatgaaaatagcagctgatacgtcattaactttattgggtattccgtatggatttggtcataatagaatgtattgttttaaattggtagctgaatgttataaaaatgccggtattgatacatcgtctaaacgaatattaggtaaagatatttttctgagccaaaacttcacagacgataatagatggataaagatatatgattctaataatttaacattttggcaaattgattaccttaaagggtgagttaatatgcataactactcctccgttgttttttccctcgttctttttcttaacgttgtttgccatcactctcataatgtaaagatattctaaaatggtaaacttttgcatatcggacgcagaaattggtataaatgttgtaattgtattatttcccgtcaatggactagtcacagctccatcagttttatatcctttagagtatttctcactcgtgtctaacattctagagcattccatgatctgtttatcgttgatattggccggaaagatagattttttattttttattatattactattggcaattgtagatataacttctggtaaatatttttctaccttttcaatctcttctattttcaagccggctatatattctgctatattgttgctagtatcaataccttttctggctaagaagtcatatgtggtattcactatatcagttttaactggtagttccattagcctttccacttctgcagaataatcagaaattggttctttaccagaaaatccagctactataataggctcaccgatgatcattggcaaaatcctatattgtaccagattaatgagagcatatttcatttccaataattctgctagttcttgagacattgatttatttgatgaatctagttggttctctagatactctaccatttctgccgcatacaataacttgttagataaaatcagggttatcaaagtgtttagcgtggctagaatagtgggcttgcatgtattaaagaatgcggtagtatgagtaaaccgttttaacgaattatatagtctccagaaatctgtggcgttacatacatgagccgaatgacatcgaagattgtccaatatttttaatagctgctctttgtccattatttctatatttgactcgcaacaattgtagataccattaatcaccgattcctttttcgatgccggacaatagcacaattgtttagctttggactctatgtattcagaattaatagatatatctctcaatacagattgcactatacattttgaaactatgtcaaaaattgtagaacgacgctgttctgcagccatttaactttaaataatttacaaaaatttaaaatgagcatccgtataaaaatcgataaactgcgccaaattgtggcatatttttcagagttcagtgaagaagtgtctataaatgtagactcgacggatgagttaatgtatatttttgccgccttgggcggatctgtaaacatttgggcaattatacctctaagtgcatcagtgttttaccgaggagccgaaaatattgtgtttaatcttcctgtgtccaaggtaaaatcgtgtttgtgtagttttcacaatgatgccatcatagatatagaacctgatctggaaaataatctagtaaaactttctagttatcatgtagtaagtgtcgattgtaacaaggaactgatgcctattaggacagatactactatttgtctaagtatagatcaaaagaaatcttacgtgtttaattttcacaagtatgaagaaaaatgttgtggtagaaccgtcattcatctagaatggttgttgggctttatcaagtgtattagtcagcatcagcatctggctattatgtttaaagatgacaatattattatgaagactcctggtaatactgatgcgttttccagggaatattctatgactgaatgttctcaagaactacaaaagttttctttcaaaatagctatctcgtctctcaacaaactacgaggattcaaaaagagagtcaatgtttttgaaactagaatcgtaatggataatgacgataacattttaggaatgttgttttcggatagagttcaatcctttaagatcaacatctttatggcgtttttagattaatactttcaatgagataaatatgggtggcggagtaagtgttgagctccctaaacgggatccgcctccgggagtacccactgatgagatgttattaaacgtggataaaatgcatgacgtgatagctcccgctaagcttttagaatatgtgcatataggaccactagcaaaagataaagaggataaagtaaagaaaagatatccagagtttagattagtcaacacaggacccggtggtctttcggcattgttaagacaatcgtataatggaaccgcacccaattgctgtcgcacttttaatcgtactcattattggaagaaggatggaaagatatcagataagtatgaagagggtgcagtattagaatcgtgttggccagacgttcacgacactggaaaatgcgatgttgatttattcgactggtgtcagggggatacgttcgatagaaacatatgccatcagtggatcggttcagcctttaataggagtaatagaactgtagagggtcaacaatcgttaataaatctgtataataagatgcaaacattatgtagtaaagatgctagtgtaccaatatgcgaatcatttttgcattatttacgcgcacacaatacagaagatagcaaagagatgatcgattatattctaagacaacagtctgcggactttaaacagaaatatatgagatgtagttatcccactagagataagttagaagagtcattaaaatatgcggaacctcgagaatgttgggatccagagtgttcgaatgccaatgttaatttcttactaacacgtaattataataatttaggactttgcaatattgtacgatgtaataccagcgtgaacaacttacagatggataaaacttcctcattaagattgtcatgtggattaagcaatagtgatagattttctactgttcccgtcaatagagcaaaagtagttcaacataatattaaacactcgttcgacctaaaattgcatttgatcagtttattatctctcttggtaatatggatactaattgtagctatttaaatgggtgccgcggcaagcatacagacgacggtgaatacactcagcgaacgtatctcgtctaaattagaacaagaagcgaacgctagtgctcaaacaaaatgtgatatagaaatcggaaatttttatatccgacaaaaccatggatgtaacctcactgttaaaaatatgtgctctgcggacgcggatgctcagttggatgctgtgttatcagccgctacagaaacatatagtggattaacaccggaacaaaaagcatacgtgccagctatgtttactgctgcgttaaacattcagacgagtgtaaacactgttgttagagattttgaaaattatgtgaaacagacttgtaattctagcgcggtcgtcgataacaaattaaagatacaaaacgtaatcatagatgaatgttacggagccccaggatctccaacaaatttggaatttattaatacaggatctagcaaaggaaattgtgccattaaagcgttgatgcaattgacgactaaggccactactcaaatagcacctagacaagttgctggtacaggagttcagttttatatgattgttatcggtgttataatattggcagcgttgtttatgtactatgccaagcgtatgttgttcacatccaccaatgataaaatcaaacttattttagccaataaggaaaacgtccattggactacttacatggacacattctttagaacttctccgatggttattgctaccacggatatgcaaaactgaaaatatattgataatattttaatagattaacatggaagttatcgctgatcgtctagacgatatagtgaaacaaaatatagcggatgaaaaatttgtagattttgttatacacggtctagagcatcaatgtcctgctatacttcgaccattaattaggttgtttattgatatactattatttgttatagtaatttatatttttacggtacgtctagtaagtagaaattatcaaatgttgttggtggtgctagtcatcacattaactattttttattactttatactataatagtactagactgacttctaacaaacatctcacctgccataaataaatgcttgatattaaagtcttctatttctaacactattccatctgtggaaaataatactctgacattatcgctaattgacacatcggtgagtgatatgcctataaagtaataatcttctttgggcacatataccagtgtaccaggttctaacaacctatttactggtgctcctgtagcatactttttctttaccttgagaatatccatcgtttgcttggtcaatagcgatatgtgattttttatcaaccactcgaaaaagtaattggagtgttcatatcctctacgggctattgtctcatggccgtgtatgaaatttaagtaacacgactgtggtagatttgttctatagagccgattgccgcaaatagatagaactaccaatatgtctgtacaaatgttaaacattaattgattaacagaaaaaacaatgttcgttctgggaatagaaaccagatcaaaacaaaattcgttagaatatatgccacgtttatacatggaatataaaataactacagtttgaaaaataacagtatcatttaaacatttaacttgcggggttaatttcacaactttactgtttttgaactgttcaaaatatagcatcgatccgtgagaaatacgtttagccgcctttaatagaggaaatcccaccgcctttctggatctcaccaacgacgatagttctgaccagcaactcatttcttcatcatccacctgttttaacatataataggcaggagatagatatccgtcattgcaatattccttctcgtaggcacacaatctaatattgataaaatctccattctcttctctgcatttattatcttgtttcggtggctgattaggctgtagtcttggtttaggccttggtctatcgttgttgaatctattttggtcattaaatctttcatttcttcctggtatatttctatcacctcgtttggttggatttttgtctatattatcgtttgtaacatcggtacgggtattcatttatcacaaaaaaaacttctctaaatgagtctactgctagaaaacctcatcgaagaagataccatattttttgcaggaagtatatctgagtatgatgatttacaaatggttattgccggcgcaaaatccaaatttccaagatctatgctttctatttttaatatagtacctagaacgatgtcaaaatatgagttggagttgattcataacgaaaatatcacaggagcaatgtttaccacaatgtataatataagaaacaatttgggtctaggagatgataaactaactattgaagccattgaaaactatttcttggatcctaacaatgaagttatgcctcttattattaataatacggatatgactgccgtcattcctaaaaaaagtggtaggagaaagaataagaacatggttatcttccgtcaaggatcatcacctatcttgtgcattttcgaaactcgtaaaaagattaatatttataaagaaaatatggaatccgcgtcgactgagtatacacctatcggagacaacaaggctttgatatctaaatatgcgggaattaatgtcctgaatgtgtattctccttccacatccataagattgaatgccatttacggattcaccaataaaaataaactagagaaacttagtactaataaggaactagaatcgtatagttctagccctcttcaagaacccattaggttaaatgattttctgggactattggaatgtgttaaaaagaatattcctctaacagatattccgacaaaggattgattactataaatggagaatgttcctaatgtatactttaatcctgtgtttatagagcccacgtttaaacattctttattaagtgtttataaacacagattaatagttttatttgaagtattcgttgtattcattctaatatatgtattttttagatctgaattaaatatgttctttatgcctaaacgaaaaatacccgatcctattgatagattacgacgtgctaatctagcgtgtgaagacgataaattaatgatctatggattaccatggatgacaactcaaacatctgcgttatcaataaatagtaaaccgatagtgtataaagattgtgcaaagcttttgcgatcaataaatggatcacaaccagtatctcttaacgatgttcttcgcagatgatgattcattttttaagtatttggctagtcaagatgatgaatcttcattatctgatatattgcaaatcactcaatatctagactttctgttattattattgatccaatcaaaaaataaattagaagctgtgggtcattgttatgaatctctttcagaggaatacagacaattgacaaaattcacagactttcaagattttaaaaaactgtttaacaaggtccctattgttacagatggaagggtcaaacttaataaaggatatttgttcgactttgtgattagtttgatgcgattcaaaaaagaatcctctctagctaccaccgcaatagatcctgttagatacatagatcctcgtcgtgatatcgcattttctaacgtgatggatatattaaagtcgaataaagtgaacaataattaattctttattgtcatcatgaacggcggacatattcagttgataatcggccccatgttttcaggtaaaagtacagaattaattagacgagttagacgttatcaaatagctcaatataaatgcgtgactataaaatattctaacgataatagatacggaacgggactatggacgcatgataagaataattttgaagcattggaagcaactaaactatgtgatgtcttggaatcaattacagatttctccgtgataggtatcgatgaaggacagttctttccagacattgtttaattctgtgagcgtatggcaaacgaaggaaaaatagttatagtagccgcactcgatgggacatttcaacgtaaaccgtttaataatattttgaatcttattccattatctgaaatggtggtaaaactaactgctgtgtgtatgaaatgctttaaggaggcttccttttctaaacgattgggtgaggaaaccgagatagagataataggaggtaatgatatgtatcaatcggtgtgtagaaagtgttacatcgactcataatattatattttttatctaaaaaactaaaaataaacattgattaaattttaatataatacttaaaaatggatgttgtgtcgttagataaaccgtttatgtattttgaggaaattgataatgagttagattacgaaccagaaagtgcaaatgaggtcgcaaaaaaactgccgtatcaaggacagttaaaactattactaggagaattattttttcttagtaagttacagcgacacggtatattagatggtgccaccgtagtgtatataggatctgctcccggtacacatatacgttatttgagagatcatttctataatttaggagtgatcatcaaatggatgctaattgacggccgccatcatgatcctattttaaatggattgcgtgatgtaactctagtgactcggttcgttgatgaggaatatctacgatccatcaaaaaacaactgcatccttctaagattattttaatttctgatgtaagatccaaacgaggaggaaatgaacctagtacggcggatttactaagtaattacgctctacaaaatgtcatgattagtattttaaaccccgtggcatctagtcttaaatggagatgcccgtttccagatcaatggatcaaggacttttatatcccacacggtaataaaatgttacaaccttttgctccttcatattcagctgaaatgagattattaagtatttataccggtgagaacatgagactgactcgagttaccaaattagacgctgtaaattatgaaaaaaagatgtactaccttaataagatcgtccgtaacaaagtagttgttaactttgattatcctaatcaggaatatgactattttcacatgtactttatgctgaggaccgtgtactgcaataaaacatttcctactactaaagcaaaggtactatttctacaacaatctatatttcgtttcttaaatattccaacaacatcaactgaaaaagttagtcatgaaccaatacaacgtaaaatatctagcaaaaattctatgtctaaaaacagaaatagcaagagatccgtacgcggtaataaatagaaacgtactactgagatatactaccgatatagagtataatgatttagttactttaataaccgttagacataaaattgattctatgaaaactgtgtttcaggtatttaacgaatcatccataaattatactccggttgatgatgattatggagaaccaatcattataacatcgtatcttcaaaaaggtcataacaagtttcctgtaaattttctatacatagatgtggtaatatctgacttatttcctagctttgttagactagatactacagaaactaatatagttaatagtgtactacaaacaggcgatggtaaaaagactcttcgtcttcccaaaatgttagagacggaaatagttgtcaagattctctatcgccctaatataccattaaaaattgttagatttttccgcaataacatggtaactggagtagagatagccgatagatctgttatttcagtcgctgattaatcaattagtagagatgagataagaacattataataattaataatattatcttatatcttatcttatatcttatatcttgtttagaaaaatgctaatattaaaatagctaacgctagtaatccaatcggaagccatttgatatctataatagggtatctaatttcctgatttaaatagcggacagctatattctcggtagctactcgtttggaatcacaaacattatttacatctaatttactatctgtaatggaaacgtttcccaatgaaatggtacaatccgatacattgcattttgttatatttttttttaaagaggctggtaacaacgcatcgcttcgtttacatggctcgtaccaacaataatagggtaatcttgtatctattcctatccgtactatgcttttatcaggataaatacatttacatcgtatatcgtctttgttagcatcacagaatgcataaatttgttcgtccgtcatgataaaaatttaaagtgtaaatataactattatttttatagttgtaataaaaagggaaatttgattgtatactttcggttctttaaaagaaactgacttgataaaaatggctgtaatctctaaggttacgtatagtctatatgatcaaaaagagattaatgctacagatattatcattagtcatgttaaaaatgacgacgatatcggtaccgttaaagatggtagactaggtgctatggatggggcattatgtaaaacttgtgggaaaacggaattggaatgtttcggtcactggggtaaagtaagtatttataaaactcatatagttaagcctgaatttatttcagaaattattcgtttactgaatcatatatgtattcactgcggattattgcgttcacgagaaccgtattccgacgatattaacctaaaagagttatcgggacacgctcttaggagattaaaggataaaatattatccaagaaaaagtcatgttggaacagcgaatgtatgcaaccgtatcaaaaaattactttttcaaagaaaaaggtttgtttcgtcaacaagttggatgatattaacgttcctaattctctcatctatcaaaagttaatttctattcatgaaaagttttggccattattagaaattcatcaatatccagctaacttattttatacagactactttcccatccctccgctgattattagaccggctattagtttttggatagatagtatacccaaagaaaccaatgaattaacttacttattaggtatgatcgttaagaattgtaacttgaatgctgatgaacaggttatccagaaggcggtaatagaatacgatgatattaaaattatttctaataacactaccagtatcaatttatcatatattacatccggcaaaaataatatgattagaagttatatcgtcgcccgacgaaaagatcagaccgctagatctgtaattggtcccagtacatctatcaccgttaatgaggtaggaatgcccgcatatattagaaatacacttacagaaaagatatttgttaatgcctttacagtggataaagttaaacaactattagcgtcaaaccaagttaaattttactttaataaacgattaaaccaattaacaagaatacgccaaggaaagtttattaaaaataaaatacatttattgcctggtgattgggtagaagtagctgttcaagaatatacaagtattatttttggaagacagccgtctctacatagatacaacgtcatcgcttcatctatcagagctaccgaaggagatactatcaaaatatctcccggaattgccaactctcaaaatgctgatttcgacggggatgaggaatggatgatattagaacaaaatcctaaagctgtaattgaacaaagtattcttatgtatccgacgacgttactcaaacacgatattcatggagcccccgtttatggatctattcaagatgaaatcgtagcagcgtattcattgtttaggatacaagatctttgtttagatgaagtattgaacatcttggggaaatatggaagagagttcgatcctaaaggtaaatgtaaattcagcggtaaagatatctatacttacttgataggtgaaaagattaattatccgggtctcttaaaggatggtgaaattattgcaaacgacgtagatagtaattttgttgtggctatgaggcatctgtcattggctggactcttatccgatcataagtcgaacgtggaaggtatcaactttattatcaagtcatcttatgtttttaagagatatctatctatttacggttttggggtgacattcaaagatctgagaccaaattcgacgttcactaataaattggaggccatcaacgtagaaaaaatagaacttatcaaagaagcatacgccaaatatctcaacgatgtaagagacgggaaaatagttccattatctaaagctttagaggcggactatgtggaatccatgttatccaacttgacaaatcttaatatccgagagatagaagaacatatgagacaaacgctgatagataatccagataataacctcctgaaaatggccaaagcgggttataaagtaaatcccacagaactaatgtatattctaggtacgtatggacaacaaaggattgatggtgaaccagcagagactcgagtattgggtagagttttaccttactatcttccagactctaaggatccagaaggaagaggttatattcttaattctttaacaaaaggattaacgggttctcaatattacttttcgatgctggttgcaagatctcaatctactgatatcgtctgtgaaacatcacgtaccggaacactggctagaaaaatcattaaaaagatggaggatatggtggtcgacggatacggacaagtagttataggtaatacgctcatcaagtacgccgccaattataccaaaattctaggctcagtatgtaaacctgtagatcttatctatccagatgagtccatgacttggtatttggaaattagtgctctgtggaataaaataaaacagggattcgtttactctcagaaacagaaacttgcaaagaagacattggcgccgtttaatttcctagtattcgtcaaacccaccactgaggataatgctattaaggttaaggatctgtacgatatgattcataacgtcattgatgatgtgagagagaaatacttctttacggtatctaatatagattttatggagtatatattcttgacgcatcttaatccttctagaattagaattacaaaagaaacggctatcactatctttgaaaagttctatgaaaaactcaattatactctaggtggtggaactcctattggaattatttctgcacaggtattgtctgagaagtttacacaacaagccctgtccagttttcacactactgaaaaaagtggtgccgtcaaacaaaaacttggtttcaacgagtttaataacttgactaatttgagtaagaataagaccgaaattatcactctggtatccgatgatatctctaaacttcaatctgttaagattaatttcgaatttgtatgtttgggagaattaaatccagacatcactcttcgaaaagaaacagataggtatgtagtagatataatagtcaatagattatacatcaagagagcagaaataaccgaattagtcgtcgaatatatgattgaacgatttatctcctttagcgtcattgtaaaggaatggggtatggagacattcattgaggacgaggataatattagatttactgtctatctaaatttcgttgaaccggaagaattgaatcttagtaagtttataatggttcttccgggggcagccaacaagggcaagattagtaaattcaagattcctatctctgactatacgggttatgacgacttcaatcaaacaaaaaagctcaataagatgactgtagaactcatgaatctaaaagaattgggttctttcgatttggaaaacgtcaacgtgtatcctggagtatggaatacatacgatatcttcggtatcgaggccgctcgtgaatacttgtgcgaagccatgttaaacacctatggagaagggttcgattatctgtatcagccttgtgatcttctcgctagtttactatgtgctagttacgaaccagaatcagtgaataaattcaagttcggcgcagctagtactcttaagagagctacgttcggagacaataaagcattgttaaacgcggctcttcataaaaagtcagaacctattaacgataatagtagctgccacttttttagcaaggtccctaatataggaactggatattacaaatactttatcgacttgggtcttctcatgagaatggaaaggaaactatctgataagatatcttctcaaaagatcaaggaaatggaagaaacagaagacttttaattcttatcaataacatatttttctatgatctgtcttttaaacgatggattttccacaaatgcgcctctcaagtccctcatagaatgatacacgtataaaaaatatagcataggcaatgactccttatttttagacattagatatgccaaaatcatagccccgcttctatttactcccgcagcacaatgaaccaacacgggctcgtttcgttgatcacatttagataaaaaggcggttacgtcgtcaaaatatttactaatatcggtagttgtatcatctaccaacggtatatgaataatattaatattagagttaggtaatgtatatttatccatcgtcaaatttaaaacatatttgaacttaacttcagatgatggtgcatccatagcatttttataatttcccaaatacacattattggttacccttgtcattatagtgggagatttggctctgtgcatatctccagttgaacgtagtagtaagtatttatacaaacttttcttatccatttataacgtacaaatggataaaactactttatcggtaaacgcgtgtaatttagaatacgttagagaaaaggctatagtaggcgtacaagcagccaaaacatcaacacttatattctttgttattatattggcaattagtgcgctattactctggtttcagacgtctgataatccagtctttaatgaattaacgagatatatgcgaattaaaaatacggttaacgattggaaatcattaacggatagcaaaacaaaattagaaagtgatagaggtagacttctagccgctggtaaggatgatatattcgacttcaaatgtgtggatttcggcgcctattttatagctatgcgattggataagaaaacatatctgccgcaagctattaggcgaggtactggagacgcgtggatggttaaaaaggcggcaaaggtcgatccatctgctcaacaattttgtcagtatttgataaaacacaagtctaataatgttattacttgtggtaatgagatgttaaatgaattaggttatagcggttattttatgtcaccgcattggtgttccgattttagtaatatggaatagtgttagataaatgcggtaacgaatgttcctgtaaggaaccataacagcttagatttaacgttaaagatgagcataaacataataaacaaaattacaatcaaacttataacattaatatcaaacaatccaaaaaatgaaatcagtggagtagtaaacgcgtacataactcctggataacgtttagcagctgccgttcctattctagaccaaaaatttggtttcatgttttcgaaacggtattctgcaacaagtcggggatcgtgttctacatatttggcggcattatccagtatctgcctattgatcttcatttcgttttcgattctggctatttcaaaataaaatcccgatgatagacctccagactttataatttcatctacgatgttcagcgccgtagtaactctaataatataggctgataagctaacatcataccctcctgtatatgtgaatatggcatgatttttgtccattacaagctcggttttaactttattgcctgtaataatttctctcatctgtaggatatctatttttttgtcatgcattgccttcaagacgggacgaagaaacgtaatatcctcaataacgttatcgttttctacaataactacatattctacctttttattttctaactcggtaaaaaaattagaatcccatagggctaaatgtctagcgatatttcttttcgtttcttctgtacacatagtgttacaaaaccctgaaaagaagtgagtatacttgtcatcatttctaatgtttcctccagtccactgtataaacgcataatccttgtaatgatctggatcatccttgactaccacaacatttcttttttctggcataacttcgttgtcctttacatcatcgaacttctgatcattaatatgctcatgaacattaggaaatgtttctgatggaggtctatcaataactggcacaacaataacaggagttttcaccgccgccatttagttattgaaattaatcatatacaactctttaatacgagttatattttcgtctatccattgtttcacattgacatatttcgacaaaaagatataaaatgcgtattccaatgcttctctgtttaatgaattactaaaatatacaaacacgtcactgtctggcaataaatgatatcttagaatattgtaacaatttattttgtattgcacatgttcgtgatctatgagttcttcttcgaatggcataggatctccgaatctgaaaacgtataaataggagttagaataataatatttgagagtattggtaatatataaactctttagcggtataattagtttttttctctcaatttctatttttagatgtgatggaaaaatgactaattttgtagcattagtatcatgaactctaatcaaaatcttaatatcttcgtcacacgttagctctttgaagtttttaagagatgcatcagttggttctacagatggagtaggtgcaacaattttttgttctacacatgtatgtactggagccattgttttaactataatggtgcttgtatcgaaaaactttaatgcagatagcggaagctcttcgccgcgactttctacatcgtaattgggttctaacgccgatctctgaatggatactagttttctaagttctaatgtgattctctgaaaatgtaaatccaattcctccggcattatagatgtgtatacatcggtaaataaaactatagtatccaacgatcccttctcgcaaattctagtcttaaccaaaaaatcgtatataaccacggagatggcgtatttaagagtggattcttctaccgttttgttcttggatgtcatataagaaactataaagtccgcactactgttaagaatgattactaacgcaactatatagttcaaattaagcattttggaaacataaaataactctgtagacgatacttgactttcgaataagtttgcagacaaacgaagaaagaacagacctctcttaatttcagaagaaaactttttttcgtattcctgacgtctagagtttatatcaataagaaagttaagaattagtcggttaatgttgtatttcattacccaagtttgagatttcataatattatcaaaagacatgataatattaaagataaagcgctgactatgaacgaaatagctatatggttcgctcaaaaatatagtcttgttaaacgtggaaacgataactgtatttttaatcacgtcagcggcatctaaattaaatataggtatatttattccacacactctacaatatgccacaccatcttcataataaataaattcgttagcaaaattattaattttagtgaaatagttagcgtcaactttcatagcttccttcaatctaatttgatgctcacacggtgcgaattccactctaacatcccttttccatgcctcaggttcatcgatctctataatatctagttttttgcgtttcacaaacacaggctcgtctctcgcgatgagatctgtatagtaactatgtaaatgataactagatagaaagatgtagctatatagatgacgatcctttaagagaggtataataactttaccccaatcagatagactgttgttatggtcttcggaaaaagaatttttataaatttttccagtattttccaaatatacgtacttaacatctaaaaaatccttaatgataataggaatggataatccgtctattttataaagaaatacatatcgcacattatacttttttttggaaatgggaataccgatgtgtctacataaatatgcaaagtctaaatattttttagagaatcttagttggtccaaattcttttccaagtacggtaatagatttttcatattgaacggtatcttcttaatctctggttctagttccgcattaaatgatgaaactaagtcactatttttataactaacgattacatcacctctaacatcatcatttaccagaatactgatcttcttttgtcgtaaatacatgtctaatgtgttaaaaaaaagatcatacaagttatacgtcatttcatctgtggtattcttgtcattgaaggataaactcgtactaatctcttctttaacagcctgttcaaatttatatcctatatacgaaaaaatagcaaccagtgtttgatcatccgcgtcaatattctgttctatcgtagtgtataacaatcgtatatcttcttctgtgatagtcgatacgttataaaggttgataacgaaaatatttttatttcgtgaaataaagtcatcgtaggattttggacttatattcgcgtctagtaaatatgcttttatttttggaatgatctcaattagaatagtctctttagagtccatttaaagttacaaacaactaggaaattggtttatgatgtataatttttttagtttttatagattctttattctatacttaaaaaatgaaaataaatacaaaggttcttgagggttgtgttaaattgaaagcgagaaataatcataaattatttcattatcgcgatatccgttaagtttgtatcgtaatggcgtggtcaattacaaataaagcggatactagtagcttcacaaagatggctgaaatcagagctcatctaaaaaatagcgctgaaaataaagataaaaacgaggatattttcccggaagatgtaataattccatctactaagcccaaaaccaaacgagccactactcctcgtaaaccagcggctactaaaagatcaaccaaaaaggaggaagtggaagaagaagtagttatagaggaatatcatcaaacaactgaaaaaaattctccatctcctggagtcagcgacattgtagaaagcgtggctgctgtagagctcgatgatagcgacggggatgatgaacctatggtacaagttgaagctggtaaagtaaatcatagtgctagaagcgatctttctgacctaaaggtggctaccgacaatatcgttaaagatcttaagaaaattattactagaatctctgcagtatcgactgttctagaggatgttcaagcagctggtatctctagacaatttacttctatgactaaagctattacaacactatctgatctagtcaccgagggaaaatctaaagttgttcgtaaaaaagttaaaacttgtaagaagtaaatgcgtgcacttttttataaagatggtaaactctttaccgataataattttttaaatcctgtatcagacgataatccagcgtatgaggttttgcaacatgttaaaattcctactcatttaacagatgtagtagtatatgaacaaacgtgggaggaggcgttaactagattaatttttgtgggaagcgattcaaaaggacgtagacaatacttttacggaaaaatgcatgtacagaatcgcaacgctaaaagagatcgtatttttgttagagtatataacgttatgaaacgaattaattgttttataaacaaaaatataaagaaatcgtccacagattccaattatcagttggcggtttttatgttaatggaaactatgttttttattagatttggtaaaatgaaatatcttaaggagaatgaaacagtagggttattaacactaaaaaataaacacatagaaataagtcccgatgaaatagttatcaagtttgtaggaaaggacaaagtttcacatgaatttgttgttcataagtctaatagactatataaaccgctattgaaactgacggatgattctagtcccgaagaatttctgttcaacaaactaagtgaacgaaaggtatacgaatgtatcaaacagtttggtattagaatcaaggatctccgaacgtatggagtcaattatacgtttttatataatttttggacaaatgtaaagtccatatctcctcttccatcaccaaaaaagttaatagcgttaactatcaaacaaactgctgaagtggtaggtcatactccatcaatttcaaaaagagcttacatggcaacgactattttagaaatggtaaaggataaaaattttttagatgtagtatctaaaactacgttcgatgaattcctatctatagtcgtagatcacgttaaatcatctacggatggatgatatagatctttacacaaataattacaagaccgataaatggaaatggataagcgtatgaaatctctcgcaatgacagctttcttcggagagctaaacacattagatattatggcattgataatgtctatatttaaacgccatccaaacaataccattttttcagtggataaggatggtcagtttatgattgatttcgaatacgataattataaggcttctcaatatttggatctgaccctcactccgatatttggagatgaatgcaagactcacgcatcgagtatagccgaacaattggcgtgtgcggatattattaaagaggatattagcgaatatatcaaaactactccccgtcttaaacgatttataaaaaaataccgcaatagatcagatactcgtatcagtcgagatacagaaaagcttaaaatagctctagctaaaggcatagattacgaatatataaaagacgcttgttaataagtaaatgaaaaaaaactagtcgtttataataaaacacgatatggatgccaacgtagtatcatcttctactattgcaacgtatatagacgctttagcgaagaatgcttcagaattagaacagaggtctaccgcatacgaaataaataatgaattggaactagtatttattaagccgccattgattactttgacaaatgtagtgaatatctctacgattcaggaatcgtttattcgatttaccgttactaataaggaaggtgttaaaattagaactaagattccattatctaaggtacatggtctagatgtaaaaaatgtacagttagtagatgctatagataacatagtttgggaaaagaaatcattagtgacggaaaatcgtcttcacaaagaatgcttgttgagactatcgacagaggaacgtcatatatttttggattacaagaaatatggatcctctatccgactagaattagtcaatcttattcaagcaaaaacaaaaaactttacgatagactttaagctaaaatattttctaggatccggtgcccaatctaaaagttctttgttgcacgctattaatcatccaaagtcaaggcctaatacatctctggaaatagaattcacacctagagacaatgaaacagttccatatgatgaactaataaaggaattgacgactctatcacgtcatatatttatggcttctccagagaatgtaattctttctccgcctattaacgcgcctataaaaacctttatgttgcctaaacaagatatagtaggtctggatctggaaaatctatatgccgtaactaagactgacggcattcctataactatcagagttacatcaaacgggttgtattgttattttacacatcttggttatattattagatatcctgttaagagaataatagattccgaagtagtagtctttggtgaggcagttaaggataagaactggaccgtatatctcattaagctaatagagcccgtgaatgcaatcaatgatagactagaagaaagtaagtatgttgaatctaaactagtggatatttgtgatcggatagtattcaagtcaaagaaatacgaaggtccgtttactacaactagtgaagtcgtcgatatgttatctacatatttaccaaagcaaccagaaggtgttattctgttctattcaaagggacctaaatctaacattgattttaaaattaaaaaggaaaatactatagaccaaactgcaaatgtagtatttaggtacatgtccagtgaaccaattatctttggagaatcgtctatctttgtagagtataagaaatttagcaacgataaaggctttcctaaagaatatggttctggtaagattgtgttatataacggcgttaattatctaaataatatctattgtttggaatatattaatacacataatgaagtgggtattaagtccgtggttgtacctattaagtttatagcagaattcttagttaatggagaaatacttaaacctagaattgataaaaccatgaaatatattaactcagaagattattatggaaatcaacataatatcatagtcgaacatttaagagatcaaagcatcaaaataggagatatctttaacgaggataaactatcggatgtgggacatcaatacgccaataatgataaatttagattaaatccagaagttagttattttacgaataaacgaactagaggaccgttgggaattttatcaaactacgtcaagactcttcttatttctatgtattgttccaaaacatttttagacgattccaacaaacgaaaggtattggcgattgattttggaaacggtgctgacctggaaaaatacttttatggagagattgcgttattggtagcgacggatccggatgctgatgctatagctagaggaaatgaaagatacaacaaattaaactctggaattaaaaccaagtactacaaatttgactacattcaggaaactattcgatccgatacatttgtctctagtgtcagagaagtattctattttggaaagtttaatatcatcgactggcagtttgctatccattattcttttcatccgagacattatgctaccgtcatgaataacttatccgaactaactgcttctggaggcaaggtattaatcactaccatggacggagacaaattatcaaaattaacagataaaaagacttttataattcataagaatttacctagtagcgaaaactatatgtctgtagaaaaaatagctgatgatagaatagtggtatataatccatcaacaatgtctactccaatgactgaatacattatcaaaaagaacgatatagtcagagtgtttaacgaatacggatttgttcttgtagataacgttgatttcgctacaattatagaacgaagtaaaaagtttattaatggcgcatctacaatggaagatagaccgtctacaaaaaactttttcgaactaaatagaggagccattaaatgtgaaggtttagatgtcgaagacttacttagttactatgttgtttatgtcttttctaagcggtaaataataatatggtatgggttctgatatccccgttctaaatgcattaaataattccaatagagcgatttttgttcctataggaccttccaactgtggatactctgtattgttaatagatatattaatacttttgtcgggtaacagaggttctacgtcttctaaaaataaaagttttataacatctggcctgttcataaataaaaacttggcgattctatatatactcttattatcaaatctagccattgtcttatagatgtgagctactgtaggtgtaccatttgattttctttctaatactatatatttctctcgaagaagttcttgcacatcatctgggaataaaatactactgttgagtaaatcagttattttttttatatcgatattgatggacatttttatagttaaggataataagtatcccaaagtcgataacgacgataacgaagtatttatacttttaggaaatcacaatgactttatcagattaaaattaacaaaattaaaggagcatgtatttttttctgaatatattgtgactccagatacatatggatctttatgcgtcgaattaaatgggtctagttttcagcacggtggtagatatatagaggtggaggaatttatagatgctggaagacaagttagatggtgttctacatccaatcatatatctaaagatatacccgaagatatgcacactgataaatttgtcatttatgatatatacacttttgacgctttcaagaataaacgattggtattcgtacaggtacctccgtcgttaggagatgatagtcatttgactaatccgttattgtctccgtattatcgtaattcagtagccagacaaatggtcaataatatgatttttaatcaagattcatttttaaaatatttattagaacatctgattagaagccactatagagtttctaaacatataacaatagttagatacaaggataccgaagaattaaatctaacgagaatatgttataatagagataagtttaaggcgtttgtattcgcttggtttaacggcgtttcggaaaatgaaaaggtactagatacgtataaaaaggtatctaatttgatataatgaattcagtgactgtatcacacgcgccatatactattacttatcacgatgattgggaaccagtaatgagtcaattggtagagttttataacgaagtagccagttggctgctacgagacgagacgtcgcctattcctgataagttctttatacagttgaaacaaccgcttagaaataaacgagtatgtgtgtgcggtatagatccgtatccgaaagatggaactggtgtaccgttcgaatcaccaaattttacaaaaaaatcaattaaggagatagcttcatctatatctagattaaccggagtaattgattataaaggttataaccttaatataatagacggggttataccctggaattattacttaagttgtaaattaggagaaacaaaaagtcacgcgatctactgggataagatttccaagttactgctgcagcatataactaaacacgttagtgttctttattgtttgggtaaaacagatttctcgaatatacgggcaaagttagaatccccggtaactaccatagtcggatatcatccagcggctagagaccgccaattcgagaaagatagatcatttgaaattatcaacgttttactggaattagacaacaaggcacctataaattgggctcaagggtttatttattaatgctttagtgaaattttaacttgtgttctaaatggatgcggctattagaggtaatgatgttatctttgttcttaagactataggtgtcccgtcagcgtgcagacaaaatgaagatccaagatttgtagaagcatttaaatgcgacgagttagaaagatatattgagaataatccagaatgtacactattcgaaagtcttagggatgaggaagcatactctatagtcagaattttcatggatgtagatttagacgcgtgtctagacgaaatagattatttaacggctattcaagattttattatcgaggtgtcaaactgtgtagctagattcgcgtttacagaatgcggtgccattcatgaaaatgtaataaaatccatgagatctaatttttcattgactaagtctacaaatagagataaaacaagttttcatattatctttttagacacgtataccactatggatacattgatagctatgaaacgaacactattagaattaagtagatcatctgaaaatccactaacaagatcgatagacactgccgtatataggagaaaaacaactcttcgggttgtaggtactaggaaaaatccaaattgcgacactattcatgtaatgcaaccaccgcatgataatatagaagattacctattcacttacgtggatatgaacaacaatagttattacttttctctacaacaacgattggaggatttagttcctgataagttatgggaaccagggtttatttcattcgaagacgctataaaaagagtttcaaaaatattcattaattctataataaactttaatgatctcgatgaaaataattttacaacggtaccactggtcatagattacgtaacaccttgtgcattatgtaaaaaacgatcgcataaacatccgcatcaactatcgttggaaaatggtgctattagaatttacaaaactggtaatccacatagttgtaaagttaaaattgttccgttggatggtaataaactgtttaatattgcacaaagaattttagacactaactctgttttattaaccgaacgaggagaccatatagtttggattaataattcatggaaatttaacagcgaagaacccttgataacaaaactaattttgtcaataagacatcaactacctaaggaatattcaagcgaattactctgtccgaggaaacgaaagactgtagaagctaacatacgagacatgttagtagattcagtggagaccgatacctatccggataaacttccgtttaaaaatggtgtattggacctggtagacggaatgttttactctggagatgatgctaaaaaatatacgtgtactgtatcaaccggatttaaatttgacgatacaaagttcgtcgaagacagtccagaaatggaagagttaatgaatatcattaacgatatccaaccattaacggatgaaaataagaaaaatagagagctatatgaaaaaacattatctagttgtttatgcggtgctaccaaaggatgtttaacattcttttttggagaaactgcaactggaaagtcgacaaccaaacgtttgttaaagtctgctatcggtgacctgtttgttgagacgggtcaaacaattttaacagatgtattggataaaggacctaatccatttatcgctaacatgcatttgaaaagatctgtattctgtagcgaactacctgattttgcatgtagtgggtcaaagaaaatcagatctgataatattaaaaagttgacagaaccttgtgtcattggaagaccgtgtttctccaataaaattaataatagaaaccatgcgacaatcattatcgatactaattacaaacctgtttttgataggatagataacgcattaatgagaagaattgccgtcgtgcgattcagaacacacttttctcaaccttctggtagagaggctgctgaaaataatgacgcgtacgataaagtcaaactattagacgaggggttagatggtaaaatacaaaataatagatatagattcgcatttctatacttgttggtgaaatggtacaaaaaatatcatgttcctattatgaaactatatcctacaccggaagagattcctgactttgcattctatctcaaaataggtactctgttagtatctagctctgtaaagcatattccattaatgacggacctctccaaaaagggatatatattgtacgataatgtggttactcttccgttgactactttccaacagaaaatatccaagtattttaattctagactatttggacacgatatagagagcttcatcaatagacataagaaatttgccaatgttagtgatgaatatctgcaatatatattcatagaggatatttcatctccgtaaatatatgctcatatatttatagaagatatcacatatctaaatgaataccggaatcatagatttatttgataatcatgttgatagtataccaactatattacctcatcagttagctactctagattatctagttagaactatcatagatgagaacagaagcgtgttattgttccatattatgggatcaggtaaaacaataatcgctttgttgttcgccttggtagcttccagatttaaaaaggtttacattctagtgccgaacatcaacatcttaaaaattttcaattataatatgggtgtagctatgaacttgtttaatgacgaattcatagctgagaatatctttattcattccacaacaagtttttattctcttaattataacgataacgtcattaattataacggattatctcgctacaataactctatttttatcgttgatgaggcacataatatctttgggaataatactggagaacttatgaccgtgataaaaaataaaaacaagattccttttctactattgtctggatctcccattactaacacacctaatactctgggtcatattatagatttaatgtccgaagagacgatagattttggtgaaattattagtcgtggtaagaaagtaattcagacacttcttaacgaacgaggtgtgaatgtacttaaggatttgcttaaaggaagaatatcatattacgaaatgcctgataaagatctaccaacgataagatatcacggacgtaagtttctagatactagagtagtatattgtcacatgtctaaacttcaagagagagattatatgattactagacgacagctatgttatcatgaaatgtttgataaaaatatgtataacgtgtcaatggcagtattgggacaacttaatctgatgaataatttagatactttatttcaggaacaggataaggaattgtacccaaatctgaaaataaataatggcgtgttatacggagaagaattggtaacgttaaacattagttccaaatttaaatactttattaatcggatacagacactcaacggaaaacattttatatacttttctaattctacatatggcggattggtaattaaatatatcatgctcagtaatggatattctgaatataatggttctcagggaactaatccacatatgataaacggcaaaccaaaaacatttgctatcgttactagtaaaatgaaatcgtctttagaggatctattagatgtgtataattctcctgaaaacgatgatggtagtcaattgatgtttttgttttcatcaaacattatgtccgaatcctatactctaaaagaggtaaggcatatttggtttatgactatcccagatactttttctcaatacaaccaaattcttggacgatctattagaaaattctcttacgccgatatttctgaaccagttaatgtatatcttttagccgccgtatattccgatttcaatgacgaagtgacgtcattaaacgattacacacaggatgaattaattaatgttttaccatttgacatcaaaaagctgttgtatctaaaatttaagacgaaagaaacgaatagaatatactctattcttcaagagatgtctgaaacgtattctcttccaccacatccatcaattgtaaaagttttattgggagaattggtcagacaatttttttataataattctcgtattaagtataacgataccaagttacttaaaatggttacatcagttataaaaaataaagaagacgctaggaattacatagatgatattgtaaacggtcacttctttgtatcgaataaagtatttgataaatctcttttatacaaatacgaaaacgatattattacagtaccgtttagactttcctacgaaccatttgtttggggagttaactttcgtaaagaatataacgtggtatcttctccataaaactgatgagatatataaagaaataaatgtcgagctttgttaccaatggatacctttccgttacattggaaccacacgagctgacgttagacataaaaactaatattaggaatgccgtatataagacgtatctccatagagaaattagtggtaaaatggccaagaaaatagaaattcgtgaagacgtggaattacctctcggcgaaatagttaataattctgtagttataaacgttccgtgtgtaataacctacgcgtattatcacgttggggatatagtcagaggaacattaaacatcgaagatgaatcaaatgtaactattcaatgtggagatttaatctgtaaactaagtagagattcgggtactgtatcatttagcgattcaaagtactgcttttttcgaaatggtaatgcgtatgacaatggcagcgaagtcactgccgttctaatggaggctcaacaaggtatcgaatctagttttgtttttctcgcgaatatcgtcgactcataaaaaagagaatagcggtaagtataaacacgaatactatggcaataattgcgaatgttttattctcttcgatatatttttgataatatgaaaaacatgtctctctcaaatcggacaaccatctcataaaatagttctcgcgcgctggagaggtagttgccgctcgtataatctctccagaataatatacttgcgtgtcgtcgttcaatttatacggatttctatagttctctgttatataatgcggtttgccctcatgattagacgacgacaatagtgttctaaatttagatagttgatcagaatgaatgtttattggcgttggaaaaattatccatgcagcgtctgcagagtggttgatagttgttcctagatatgtaaaataatccaacttactaggcagcaaattgtctagataaaatactgaatcaaacggtgcagacgtattggcggatctaatggaatccaattgattaactatcttttgaaaatatacatttttatgatccaatacttgtaagaatatagaaataatgataagtccatcatcgtgtttttttgcctcttcataagaactatattttttcttattccaatgaacaagattaatctctccagagtatttgtacacatctatcaagtgattggatccataatcgtcttcctttccccaatatatatgtagtgatgataacacatattcattggggagaaaccctccacttatatatcctcctttaaaattaatccttactagttttccagtgttctggatagtggttggtttcgactcattataatgtatgtctaacggcttcaatcgcgcgttagaaattgcttttttagtttctatattaataggagatagttgttgcggcatagtaaaaatgaaatgataactgtttaaaaatagctcttagtatgggaattacaatggatgaggaagtgatatttgaaactcctagagaattaatatctattaaacgaataaaagatattccaagatcaaaagacacgcatgtgtttgctgcgtgtataacaagtgacggatatccgttaataggagctagaagaacttcattcgcgttccaggcgatattatctcaacaaaattcagattctatctttagagtatccactaaactattacggtttatgtactacaatgaactaagagaaatctttagacggttgagaaaaggttctatcaacaatatcgatcctcactttgaagagttaatattattgggtggtaaactagataaaaaggaatctattaaagattgtttaagaagagaattaaaagaggaaagtgatgaacgtataacagtaaaagaatttggaaatgtaattctaaaacttacaacacgggataaattatttaataaagtatatataagttattgcatggcgtgttttattaatcaatcgttggaggatttatcgcatactagtatttacaatgtagaaattagaaagattaaatcattaaatgattgtattaacgacgataaatacgaatatctgtcttatatttataatatgctagttaatagtaaatgaacttttacagatctagtataattagtcagattattaagtataatagacgactagctaagtctattatttgcgaggatgactctcaaattattacactcacggcattcgttaaccaatgcctatggtgtcataaacgagtatccgtgtccgctattttattaactactgataacaaaatattagtatgtaacagacgagatagttttctctattctgaaataattagaactagaaacatgtttagaaaaaaacgattatttctgaattattccaattatttgaacaaacaggaaagaagtatactatcgtcatttttttctctagatccagctactactgataatgatagaatagacgctatttatccgggtggcatacccaaaaggggtgagaatgttccagagtgtttatccagggaaattaaagaagaagttaatatagacaattcttttgtattcatagacactcggttttttattcatggcatcatagaagataccattattaataaattttttgaggtaatcttctttgtcggaagaatatctctaacgagtgatcaaatcattgatacatttaaaagtaatcatgaaatcaaggatctaatatttttagatccgaattcaggtaatggactccaatacgaaattgcaaaatatgctctagatactgcaaaacttaaatgttacggccatagaggatgttattatgaatcattaaaaaaattaactgaggatgattgattagaaaatataaattaatttaccatcgtgtatttttataacgggattgtccggcatatcatgtagatagttaccgtctacatcgtatactcgaccatctacgcctttaaatcctctatttattgacattaatctattagaattggaataccaaatattagtaccctcaattagtttattggtaatattttttttagacgatagatcgatggctcttgaaaccaaggttttccaaccggactcattgtcgatcggtgaaaagtctttttcattagcatgaatccattctaatgatgtatgtttaaacactctaaacaattggacaaattcttttgatttgctttgaatgatttcaaataggtcttcgtctacagtaggcataccattagataatctagccattataaagtgcacgtttacatatctacgttctggaggagtaagaacgtgactattgagacgaatggctcttcctactatctgacgaagagacgcctcgttccatgtcatatctaaaatgaagatatcattaattgagaaaaaactaataccctcgcctccactagaagagaatacgcatgttttaatgcattctccgttagtgtttgattcttggttaaactcagccaccgccttgattctagtatcttttgttctagatgagaactctatattagagataccaaagactttgaaatatagtaataagatttctattcctgactgattaacaaatggttcaaagactagacatttaccatgggatgctaatattcccaaacatacatctataaatttgacgcttttctcttttaattcagtaaatagagagatatcagccgcactagcatcccctttcaatagttctccctttttaaaggtatctaatgcggatttagaaaactctctatctcttaatgaatttttaaaatcattatatagtgttgctatctcttgcgcgtattcgcccggatcacgattttgtctttcaggaaagctatcgaacgtaaacgtagtagccatacgtctcagaattctaaatgatgatatacctgtttttatttcagcgagtttagccttttgataaatttcttcttgctttttcgacatattaacgtatcgcattaatactgttttcttagcgaatgatgcagacccttctacgtcatcaaaaatagaaaactcgttattaactatatacgaacatagtcctcctagtttggagactaattctttttcatcgactagacgtttattctcaaatagtgattggtgttgtaaggatcctggtcgtagtaagttaaccaacatggtgaattcttgcacactattgacgataggtgtagccgataaacaaatcatcttatggttttttaacgcaatggtcttagataaaaaattatatactgaacgagtaggacggatcttaccatcttctttgattaatgatttagaaatgaagttatgacattcatcaatgatgacgcatattctactcttggaattaatagttttgatattagtaaaaaatttatttctaaaattttgatcatcgtaattaataaaaatacaatccttcgttatctctggagcgtatctgagtatagtgttcatccaaggatcttctatcaaagcctttttcaccaataagataatagcccaattcgtataaatatccttaagatgtttgagaatatatacagtagtcattgttttaccgacacccgtttcatggaacaataaaagagaatgcatactgtctaatcctaagaaaactcttgctacaaaatgttgataatccttgaggcgtactacgtccgaccccatcatttcaacgggcatattagtagttctgcgtaaggcataatcgatataggccgcgtgtgatttactcatttatgagtgataagtaataactatgttttaaaaatcacagcagtagtttaactagtcttctctgatgtttgttttcgatactttttgaatcagaagtcatactagaataaagcaacgagtgaacgtaatagagagcttcgtatactctattcgaaaactctaagaacttattaatgaattccgtatccactggattgtttaaaatactaaattgaacactgttcacatccttccaagaagaagacttagtgacggacttaacatgagacataaataaatccaaattttttttacaaacatcactagccaccataatggcgctatctttcaaccagctatcgcttacgcattttagcagtctaacatttttaaagagactacaatatattctcatagtatcgattacacctctaccgaataaagttggaagtttaataatacaatatttttcgtttacaaaatcaaataatggtcgaaacacgtcgaaggttaacatcttataatcgctaatgtatagattgttttcagtgagatgattattagatttaatagcatctcgttcacgtttgaacagtttattgcgtgcgctgaggtcggcaactacggcgtccgctttagtactcctcccataatactttacgctattaatctttaaaatttcatagactttatctagatcgctttctggtaacatgatatcatgtgtaaaaagttttaacatgtcggtcggcattctatttagatcattaactctagaaatctgaagaaagtaattagctccgtattccagactaggtaatgggcttttacctagagacagattaagttctggcaatgtttcataaaatggaagaaggacatgcgttccctcccggatattttttacaatttcatccatttacaactctatagtttgttttcattattattagttattatctcccataatcttggtaatacttaccccttgatcgtaagataccttatacaggtcattacatacaactaccaattgtttttgtacataatagattggatggttgacatccatggtggaataaactactcgaacagatagtttatctttccccctagatacattagccgtaatagttgtcggcctaaagaatatctttggtgtaaagttaaaagttagggttcttgttccattattgctttttgtcagtagttcattataaattctcgagatgggtccgttctctgaatatagaacatcatttccaaatctaacttctagtctagaaataatatcggtcttattcttaaaatctattcccttgatgaagggatcgttaatgaacaaatccttggcctttgattcggctgatctattatctccgttatagacgttacgttgactagtccaaagacttacaggaatagatgtatcgatgatgttgatactatgtgatatgtgagcaaaaattgttctcttagtggcatcgctatatgttccagtaatggcggaaaactttttagaaatgttatatataaaagaattttttcgtgttccaaacattagcagattagtatgaagataaacactcatattatcaggaacattatcaatttttacatacacatcagcatcttgaatagaaacgataccatcttctggaacctctacgatctcggcagactccggataaccagtcggtgggccatcactaacaataactagatcatccaacaatctactcacatatgcatctatataatctttttcatcttgtgagtaccctggatacgaaataaatttattatccgtatttccataataaggtttagtataaacagagagcgatgttgccgcatgaacttcagttacagtcgccgttggttggtttatttgacctattactctcctaggtttctctataaatgatggtttaatttgtacattcttaaccatatatccaataaagctcaattcaggaacataaacaaattctttgttgaacgtttcaaagtcgaacgaagagtcacgaataacgatatcggatactggattgaaggttaccgttacggtaatttttgaatcggatagtttaagactgctgaatgtatcttccacatcaaacggagttttaatataaacgtatactgtagatggttctttaatagtgtcattaggagttaggccaatagaaatatcattaagttcactagaatatccagaatgtttcaaagcaattgtattattgatacaattattatataattcttcgccctcaatttcccaaataacaccgttacacgaagagatagatacgtgattaatacatttatatccaacatatggtacgtaactgaatcttcccatacctttaacttctggaagttccaaactcagaaccaaatgattaagcgcagtaatatactgatccctaatttcgaagctagcgatagcctgattgtctggaccatcgtttgtcataactccggatagagaaatatattgcggcatatataaagttggaatttgactatcgactgcgaagacattagaccgtttaatagagtcatccccaccgatcaaagaattaatgatagtattattcattttctatttaaaatggaaaaagcttacaataaactccgtagagaaatatctataatttgtgagttttccttaaagtaacagcttccgtaaacgccgtctttatctcttagtaggtttattgtatttatgaccttttccttatcttcatagaatactaaaggcaacaaagaaatttttggttcttctctaagagctacgtgagacttaaccatagacgccaacgaatccctacatattttagaacagaaataccctacttcaccacccttgtatgtctcaatactaataggtctaaaaaccaaatcttgattacaaaaccaacacttatcaattacactatttgtcttaatagacacatctgccatagatttataatactttggtagtatacaagcgagtgcttcttctttagcgggcttaaagactgctttaggtgctgaaataaccacatctggaaggcttactcgcttagccatttaattacggaactatttttttatacttctaatgagcaagtagaaaacctctcatctacaaaaacgtactcgtgtccataatcctctaccatagttacacgttttttagatctcatatgtgctaaaaagttttcccatactaattggttactattatttttcgtataatttttaacagtttgaggttttagatttttagttacagaagtgatatcgaatattttatccaaaaagaatgaataattaattgtcttagaaggagtgttttcttggcaaaagaataccaagtgcttaaatatttctactacttcattaatcttttctgtactcagattcagtttctcatcttttacttgattgattatttcaaagactaacttataatcctttttatttattctctcgttagccttaagaaaactagatacaaaatttgcatctacatcatccgtggatatttgatttttttccatgatatccaagagttccgagataatttctccagaacattgatgagacaataatctccgcaatacatttctcaaatgaataagtttattagacacatggaagtttgactttttttgtacctttgtacatttttgaaatacagactcgcaaaaaatacaatattcatatccttgttcagatactataccgttgtgtctacaaccgctacataatcgtagattcatgttaacactctacgtatctcgtcgtccaatattttatataaaaacattttatttctagacgttgccagaaaatcctgtaatatttttagttttttgggctgtgaataaagtatcgccctaatatggttaccgtcttccgccaatatagtagttaaattatccgcacatgcagaagaacaccgcttaggcggattcagtacaatgttatatttttcgtaccaactcatttaaatatcataatctaaaatagttctgtaatatgtctagcgctaatatattgatcataatcctgtgcataaattaagatacaacaatgtctcgaaatcatcgacatggcttcttccatagttagaagatcgtcgtcaaagttagcaacgtgattcatcaacatttgctgttttgaggcagcaaatactgaaccgtcgccattcaaccattcataaaaaccatcgtctgaatccattgataatttcttgtactggtttttgagagctcgcatcaatctagcatttctagctcccggattgaaaacagaaagaggatcgtacatccagggtccattttctgtaaatagaatcgtataatgtcccttcaagaagatatcagacgatccacaatcaaagaattggtctccgagtttgtaacaaacagcggactttaacctatacatgataccgtttagcataatttctggtgatacgtcaatcggagtatcatctattagagatctaaagccggtgtaacattctccaccaaacatattcttattctgacgtcgttctacataaaacatcattgctccattaacgataacaggggaatgaacagcactacccatcacattagttcccaatggatcaatgtgtgtaactccagaacatcttccatatcctatgttaggaggagcgaacaccactcttccactattgccatcgaatgccatagaataaatatccttggaattgatagaaatcggactgtcggatgttgtgatcatcttcataggattaacaactatgtatggtgccgcctgaagtttcatatcgtaactgatgccgtttataggtctagccacagaaaccaacgtaggtctaaatccaactatagacaaaatagaagccaatatctgttcctcatctgtcataacttgagagcatccagtatgaataatcttcattagatggggatctaccgcatcatcatcgttacaataaaaaattcccattctaatgttcataattgcttttctaatcatggtatgcatgtttgctctctgaatctctgtggaaattagatctgatacacctgtaatcactatcggattatcctccgtaagacgattaaccaacaacatataattataagactttacttttctaaattcataaagttgctggattaggctataggtgtctccatgtacatacgcgttctcgagcgcaggaagtttaataccgaatagtgccatcagaataggatgaatatagtaattagtttctggttttctataaataaaagacaaatcttgtgaactagacatatcggtaaaatgcatggattggaatcgtgtagtcgacagaagaatatgatgattagatggagagtatattttatctaactctttgagttggtcaccgattctaggactagctcgagaatgaataagtactaaaggatgagtacatttcacagaaacactagcattgttcaatgtgctctttacatgggtaaggagttgaaatagctcgtttctatttgttctgacaatatttagtttattcataatgttaagcatatcctgaatagtaaagttagatgtgtcatacttgttagtagttagatatttagcaattgcattcccatcatttctcaatctcgtactccaatcatgtgtagatgctacttcgtcgatggaaaccatacaatcctttttgataggctgttgagattgatcatttcctgcacgtttaggtttggtacgttgatttctagcccctgcggatataaagtcatcgtctacaatttgggacaatgaattgcatacactacaagacaaagatttatcagaagtgtgaatatgatcttcatctaccaaagaaagagtttgattagtataactagattttagtcctgcgttagatgttaaaaaaacatcgctattgaccacggcttccattatttatattcgtagtttttactcgaaagcgtgattttaatatccaatcttattacttttggaatcgttcaaaacctttgactagttgtagaatttgatctattgccctacgcgtatactcccttgcatcatatacgttcgtcaccagatcgtttgtttcggcctgaagttggtgcatatctctttcaacattcgacatgagatccttaagggccatatcgtctagattttgttgagatgctgctcctggatttggattttgttgtgctgttgtacatactgtaccaccagtaggtgtaggagtacatacagtggccacaataggaggttgagaaagtgtaaccgttggagtagtacaagaaatacttccatccgattgttgtgtacatgtagttgttggtaacgtctgagaaggttgggtagatggcggcgtcgtcgttttttgatctttattaaatttagagataatatcctgaacagcattgctcggcgtcaacgctggaaggagtgaactcgccggcgcatcagtatcttcagacagccaatcaaaaagattagacatatcagatgatgtattagtttgttgtcgtggttttggtgtaggagcagtactactaggtagaagaataggagccgatgtagctgttggaaccggctgtggagttatatgaatagttggttgtagcggttggataggctgtctgctggcggccatcatattatctctagctagttgttctcgcaactgtctttgataatacgactcttgagactttagtcctatttcaatcgcttcatcctttttcgtatccggatccttttcttcagaataatagattgacgactttggtgtagaggattctgccagcctctgtgagaacttgttaaagaagtccatttaaggctttaaaattgaattgcgattataagattaaatggcagacacagacgatattatcgactatgaatccgatgatctcaccgaatacgaggatgatgaagaagaggaagaagatggagagtcactagaaactagtgatatagatcccaaatcttcttataagattgtagaatcagcatccactcatatagaagatgcgcattccaatcttaaacatatagggaatcatatatctgctcttaaacgacgctatactagacgtataagtctatttgaaatagcgggtataatagcagaaagctataacttgcttcaacgaggaagattacctctagtttcagaattttctgacgaaacgatgaagcaaaatatgctacatgtaattatacaagagatagaggagggttcttgtcctatagtcatcgaaaagaacggagaattgttgtcggtaaacgattttgacaaagatggtctaaaattccatctagactatattatcaaaatttggaaacttcaaaaacgatattagaatttatacgaatatcgttctctaaatgtcacaatcaagtctcgcatgttcagcaatttattgtcgtactttatatcgtgttcattaacgatatcttgcaaaatagtaatgattctatcttccttcgatagatattcttcagagattattgtcttatattctttcttgttatcagatatgaatttgataagactttgaacattattgatacccgtctgtttaattttttctacagatattttagttttggcagattctatcgtatctgtcaatagacatccaacatcgacattcgacgtcaattgtctataaatcaacgtataaattttagaaataacattagcgaattgttgtgcgttgatgtcgttattctgaaacagtatgattttaggtagcattttcttaacaaagagaacgtatttattgttactcagttgaacagatgatatatccagattactaacgcatctgattccgtataccaaactttcagaagaaatggtatacaattgtttgtattcattcaatgtctctttttcagaaattagtttagagtcgaatactgcaataattttcaagagatagttttcatcagataagattttatttagtgtagatatgataaaactattgttttgttggagaacttgatacgccgcgttctctgtagtcgacgctctcaaatgggaaacaatctccattatttttttggaatcggatactatatcttcggtatcttgacgcagtctagtatacatagagttaagagagattagagtttgtacattaagcaacatgtctctaaatgtggctacaaacttttcctttttcacatcatctagtttattatataccgatttcacaacggcaccagatttaaggaaccagaatgaaaaactctgataactacaatatttcatcatagttacgattttatcatcttctatagttggtgtaatagcgcatacctttttctccaagactggaaccaacgtcataaaaatgtttaaatcaaaatccatatcaacatctgatgcgctaagaccagtctcgcgttcaagattatctttactaatggtgacgaactcatcgtataaaactctaagtttgtccattatttatttacagatttagttgtttaatttatttgtgctcttccagagttgggatagtatttttctaacgtcggtattatattattaggatctacgttcatatgtatcataatattaatcatccacgttttgataaatctatctttagcttctgaaataacgtatttaaacaaaggagaaaaatatttagctacggcatcagacgcaataacattttttgtaaatgtaacgtatttagacgacagatcttcgttaaaaagttttccatctatgtagaatccatcggttgttaacaccattcccgcgtcagattgaataggagtttgaatagtttgttttggaaatagatccttcaataacttatagttgggtgggaaaaaatcgattttatcactagactctttcttttttactatcattacctcatgaactatttcttgaatgagtatatgtattttctttcctatatcggacgcgttcattggaaaatataccatgtcgttaactataagaatatttttatcctcgtttacaaactgaataatatcagatgtagttcgtaaacgaactatatcatcaccagcacaacatctaactatatgatatccactagtttcctttagccgtttattatcttgttccatattagcagtcattccatcatttaagaaggcgtcaaagataatagggagaaatgacattttggattctgttacgactttaccaaaattaaggatatacggacttactatctttttctcaacgtcaatttgatgaacacacgatgaaaatgtgcttctatgagattgatcatgtagaaaacaacaagggatacaatatttccgcatatcatgaaatatattaagaaatcccaccttattatatttccccaaaggatccatgcacgtaaacattatgccgttatcattaataaagacttctttctcatcggatctgtaaaagttgttactgatttttttcattccaggatctagataattaataatgatgggttttctattcttattctttgtattttggcatatcctagaccagtaaacagtttccactttggtaaaatcagcagacttttgaacgctattaaacatggcattaatggcaataactaaaaatgtaaaatatttttctatgttaggaatatggtttttcactttaatagatatatggtttttggccaaaatgatagatatttttttatccgaggatagtaaaatattattagtcgccgtctctataaaaatgaagctagtctcgatatccaattttattctagaattgataggagtcgccaaatgtaccttatacgttatatctcccttgatgcgttccatttgtgtatctatatcggacacaagatctgtaaatagttttacgttattaatcatcacggtatcgccgtcgctagataacgctaatgtaccatccaagtcccaaatggagagatttaactgttcatcgtttagaataaaatgattaccggtcatattaataaagtgttcatcgtatctagataacaacgacttataattaatgtccaagtcttgaactcgctgaatgatcttttttaacccagttagttttagattggtacgaaatatattgttaaactttgattctacagtaatgtccaaatctagttgtggaaatacttccatcaacattgtttcaaacttgataatattattatctacatcttcgtacgatccaaattccggaatagatgtatcgcacgctctggccacccagataaccaaaaagtcacacgctccaggatatacattgtataaaaagctatcgttttttagtagggtttttttctgcgtgtatacgaagggattaaaaatagtattatcaacgtaactatattccaaattattcttatgagaatagataataatatcgtccttaatatctaacaaatttcctaaatatccctttaattgagtcattcgaagcgtcaatagaatatgtctcttaactatttccggctgttgtatatttaaatgacttcgtaaaaaataatatatgggcgacttctcatctatgtaatcatatggagtgagatatagggctcgttctacctcctgccccttacccacctgtaataccaattgcggacttactatatatcgcatatttatatcgtggggtaaagtgaaaatctactaccgatgatgtaagtcttacaatgttcgaaccagtaccagatcttaatttggaggcctccgtagaactaggggaggtaaatatagatcaaacaacacctatgataaaggagaatagcggttttatatcccgcagtagacgtctattcgcccatagatctaaggatgatgagagaaaactagcactacgattctttttacaaagactttattttttagatcatagagagattcattatttgttcagatgcgttgacgctgtaaaagacgtcactattaccaaaaaaaataacattatcgtggcgccttatatagcacttttaactatcgcatcaaaaggatgcaaacttacagaaacaatgattgaagcattctttccagaactatataatgaacatagtaagaaatttaaattcaactctcaagtatccatcatccaagaaaaactcggataccagtttggaaactatcacgtttatgattttgaaccgtattactctacagtagctctggctattcgagatgaacattcatctggcatttttaatatccgtcaagagagttatctggtaagttcattatctgaaataacatatagattttatctaattaatctaaaatctgatcttgttcaatggagtgctagtacgggcgctgtaattaatcaaatggtaaatactgtattgattacagtgtatgaaaagttacaactggtcatagaaaatgattcacaatttacatgttcattggctgtggaatcaaaacttccaataaaattacttaaagatagaaatgaattatttacaaaattcattaacgagttaaaaaagaccagttcattcaagataagcaaacgcgataaggatacgctactaaaatattttacttaggactggagttagaatttatagacgactcatttcgtttatcattgttactattattactattactatcattattagtgttggcattattagtattcttcttgtcatcttgttcagaaatatacagcaatgctatacctaatactaaatacattatcatgctcgcaatggctctaacaacaacgaaccaaaatgaatttggtcgtagcttttgttcacaaaaatacataaagaaatgtctacataaatctatggcgccattggctacttgaaatagcgccagtcctcctacagattttaatatagctgtataacatgacatttattcatcatcaaaagagacagagtcaccatctgtcatatttagattttttttcatgtgttcaaagtatcctctactcatttcattataatagtttatcatacttagaattttaggacggatcaatgagtaagacttgactagatcgtcagtagtaatttgtgcatcgtctattctgcatccgcttcgtcgaataatgtatagcatcgctttgagattctccatagctatcaagtctttatacaatgacatggaaatatctgtgaatactttatacttctccaacatcgatgccttaacatcatcgcctactttagcattgaaaatacgttctattgtgtagatggatgtagcaagatttttaaacaacaatgccatcttacacgatgattgcctcaagtctccaatcgtttgtttagaacgattagctacagagtccaatgcttggctgactagcatattattatctttagaaattgtattcttcaatgaggcgtttatcatatctgtgatttcgttagtcatattacagtctgactgggttgtaatgttatccaacatatcacctatggatacggtacacgtaccagcatttgtaataatcctatctaagatgttgtatggcattgcgcagaaaatatcttctcctgtaatatctccactctcgataaatctactcagattattcttaaatgccttattctctggagaaaagatatcagtgtccatcatttcattaatagtatacgcagaaaagataccacgagtatcaattctatccaagatacttatcggttccgagtcacagataatggtttcctctccttcgggagatcctgcatagaaatatctaggacaatagtttctatactgtctgtaactctgataatctctaaagtcactaactgataccatgaaattgagaagatcaaacgctgaagtaattaatttttctgcctcgtttttactacaactagttttcatcaatgtagtgacgatgtattgtttagttacttttggtctaatactgatgatagagatattattgcttcccataatggatcttctagtagtcaccttaaagcccattgatgcgaatagcagatagataaagtcttggtatgactcctttctaatatagtacggactacctttgtcacccaactttatacccacataagccataacaacctctttaatagccgtttcatgaggtttatcagccatgagcctgagtagttggaagaatctcatgaatcccgtctcagaaagtcctatatgcatgatagatttatctttcctgggaaactctcgtatagtcatagatgaaatactctttaaagtttctgaaataagattagtaacagtcttacctccgactactctaggtaacaaacaaactctaataggtgttttctctgcggagataatatcagaaaggatagagcaataagtagtattattgtgattataaagaccgaatacataacaggtagaatttataaacatcatgtcctgaaggtttttagacttgtattcctcgtaatccataccgtcccaaaacatggatttggtaactttgatagccgtagatctttgttccttcgccaacaggttaaagaaattaataaagaatttgtggtttctacctatgtctacaaattgcacgtttggaagcgccacggttacattcactgcagcattttgaggatcgcgagtatgaagtacgatgttattgtttactggtatatctggaaagaaatctaccagtctaggaataagagattgatatcgcatagaaatagtaaagtttataatctcatcatcgaagagcattttgttaccattgtaataaatatccactctgtcatatgtataaatgaagtactgttcaaacatgatgagatgtttatatgttggcatagtagtgagatcgacgtttggtaatggcaatgtattaagattaactccataatgtctagcagcatctgcgatgttataagcgtcgtcaaagcggggtcgatcttgtattgttatatattgtctaacacctataagattatcaaaatcttgtctgcttaatacaccgttaacaatttttgccttgaattcttttattggtgcattaataacatccttatagaggatgttaaacaaataagtgttatcaaagttaagatctggatatttcttttctgctagaacatccattgagtcggagccatctggtttaatataaccaccgataaatctagctctgtattctgtatccgtcaatctaatattaagaaggtgttgagtgaaaggtggaagatcgtaaaagctgtgagtattaatgataggattagtttccgaactaatgttaattggggtattaataatatctatatttccagcgttaagtgtaacattaaacagttttaattcacgtgacgtggtatcaattaaataattaatgcccaatttggatatagcagcctgaagctcatcttgtttagttacggatcctaatgagttattaagcaatatatcgaacggatgaacgaaggttgttttaagttggtcacatactttgtaatctagacatagatgcggaagaacggtagaaactatacgaaataaatattcagagtcctctaattgatcaagagtaactattgacttaataggcatcatttatttagtattaaatgacgaccgtaccagtgacggatatacaaaacgatttaattacagagttttcagaagataattatccatctaacaaaaattatgaaataactcttcgtcaaatgtctattctaactcacgttaacaacgtggtagatagagaacataatgccgccgtagtgtcatctccagaggaaatatcctcacaacttaatgaagatctatttccagatgatgattcaccggccactattatcgaacgagtacaacctcatactactattattgacgatactccacctcctacgtttcgtagagagttattaatatcggaacaacgtcaacaacgagaaaaaagatttaatattacagtatcgaaaaatgctgaagcaataatggaatctagatctatgataacttctatgccaacacaaacaccatccttgggagtagtttatgataaagataaaagaattcagatgttagaggatgaagtggttaatcttagaaatcaacgatctaatacaaaatcatctgataatttagataattttaccaaaatactatttggtaagactccgtacaaatcaacagaagttaataagcgtatagccatcgttaattatgcaaatttgaacgggtcccccttatcagtcgaggacttggatgtttgttcggaggatgaaatagatagaatctataaaacgattaaacaatatcacgaaagtagaaaacgaaaaattatcgtcactaacgtgattattattgtcataaacattatcgagcaggcattgctaaaactcggatttgaagaaatcaaaggactgagtaccgatatcacttcagaaattatcgatgtggagatcggagatgactgcgatgctgtagcatcaaaactaggaatcggtaacagtccggttcttaatattgtattgtttatactcaagatattcgttaaacgaattaaaattatttaatttaatacattcccatatccagacaacaatcgtctggattaatctgttcctgtcgtctcataccggacgacatattaatctttttattagtgggcatctttttagatggtttctttttcccagcattaactgagtcgatacctagaagatcgtgattgatctctccgaccattccacgaacttctaattggccgtctctgacggtaccataaactattttaccagcattagtaacagcttggacaatctgaccatccatcgcattgtacgatgtagtagtaactgttgttctacgtctaggagcaccagaagtatttttggagcccttggatgttgatgtagaagaagacgaggattttgattttggtttacatgtaatacattttgaactctttgattttgtatcacatgcgccggcagtcacatctgtttgagaattaagattattgttgcctcctttgacggctgcatctccaccgatttgcgctagtagatttttaagctgtggtgtaatcttattaactgtttcgatataatcatcgtaactgcttctaacggctaaattttttttatccgccatttagaagctaaaaatatttttatttatgcagaagatttaactagattatacaatgaactaatatgatccttttccagattatttacaaacttggtattttttggttctggaggaggcgaatttaaattcggacttggattcggattttgtaagttcttgatcttattatacatcgagtataggatggcgacagtaactgctacacaaataccgatcaaaagaagaataccaatcatttattgacaataacttcactattgatcaagtatgcaatatatcatcttttcactaaataagtagtaataatgattcaacaatgtcgagatatatggacgataataatttagttcatggaaatatcgctatgattggtgtgaatgactccgctaactctgtggggtgcgcagtgctttccccacatagaataaattagcattccgactgtgataataataccaagtataaacgccataatactcaatactttccatgtacgagtgggactggtagacttactaaagtcaataaaggcgaagatacacgaaagaatcaaaagaatgattccagcgattagcacgccggaaaaataatttccaatcataagcatcatgtccatttaactaataaaaattttaaatcgccgaatgaacaaagtggaatataaaccatataaaaacaatagtttgtactgcaaaaataatatctatttttgttttcgaagatatggtaaaattaaatagtagtacacagcatgttataactaacagcagcaacggctcgtaattacttatcatttactagacgaaaaggtggtgggatattttcttgctcaaataatacgaatatatcacccatccattttatgcgatgtttatatactctaatctttaatagatctatagacgacgggtttaccaacaatatagattttatcgattcatctaatttaaacccttccttaaacgtgaatgatctattatctggcataacgatgaccctacctgatgaatcggacaatgtactgggccatgtagaataaattatcaacgaattatcgtctacgaacatttatatcatttgttttaattttaggacgcgaataaatggatataaaatagaaaataacagatattacaaccagtgttatggccgcgcccaaccaggtaggcagttttattttatcttttactacaggttctcctggatgtacgttaccaacggcggacgtagttctagtacaattagacgtaagttccgcttgggaattttttaacgctaaagagttaacgttaatcgtgcacccaacgtatttacatctagttcgttgaacatcttgattataatataaccattttctatctctagattcgtcagtgcactcatgtaaccaacataccctaggtcctaaatatttatctccggaattagattttggataattcgcgcaccaacaatttctatttcctttatgatcgttacaaaagacgtataatgccgtatccccaaaagtaaaataatcaggacgaataattctaataaactcagaacaatatctcgcatccatatgtttggagcaaatatcggaataagtagacatagccggtttccgttttgcacgtaaccattctaaacaattggggtttccaggatcgtttctacaaaatccagtcatgaaatcgtcacaatgttctgtcttgtaattattattaaatatttttggacagtgtttggtatttgtcttagaacaacattttgccacgctatcactatcgcccaggagataatccttttttataaaatgacatcgttgcccggatgctatataatcagtagcgtgttttaaatccttaatatattcaggagttacctcgttctgataatagattaatgatccaggacgaaatttgaaagaactacatggttctccatgaattaatacatattgtttagcaaattcaggaactataaaactactacaatgatctatcgacataccatctatcaaacaaaacttgggtttaatttctcccggagatgtttcataatagtacgtataactttcttctgcaaacttaacagctctattatattcaggataattaaaacctaattccatatatttgtctcgtatatctgctattcctggtgctattttgattctattaagagtaacagctgcccccattcttaataatcgtcagtatttaaactgttaaatgttggtatatcaacatctaccttatttcccgcagtataaggtttgttgcaggtatactgttcaggaatggttacatttatacttcttctatagtcctgtctttcgatgttcatcacatatgcaaagaacagaataaacaaaataatgtaagaaataatattaaatatctgtgaattcgtaaatacattgattgccataataattacagcagctacaatacacacaatagacattcccacagtgttgccattacctccacgatacatttgagttactaagcaataggtaataactaagctagtaagaggcaatagaaaagatgagataaatatcatcaatatagagattagaggagggctatatagagccaagacgaacaaaatcaaaccgagtaacgttctaacatcattatttttgaagattcccaaataatcattcattcctccataatcgttttgcatcatacctccatctttaggcataaacgattgctgctgttcctctgtaaataaatctttatcaagcactccagcacccgcagagaagtcgtcaagcatattgtaatatcttaaataactcatttatatattaaaaaatgtcactattaaagatggagtataatctttatgccgaactaaaaaaaatgacttgtggtcaacccctaagtctttttaacgaagacggggatttcgtagaagttgaaccgggatcatcctttaagtttctgatacctaagggattttacgcctctccttccgtaaagacgagtctagtattcgagacattaacaacgaccgataataaaatcactagtatcaatccaacaaatgcgccaaagttatatcctcttcaacgcaaagtcgtatctgaagtagtttctaatatgaggaaaatgatcgaatcaaaacgtcctctatacattactcttcacttggcgtgtggatttggtaagactattaccacgtgttatcttatggctacacacggtagaaaaaccgtcatttgcgtacccaataaaatgttaatacatcaatggaagacacaggtagaggcagtcggattggaacataagatatccatagatggagtaagtagtctattaaaggaactaaagactcaaagtccggatgtattaatagtagtcagtagacatctgacaaacgatgccttttgtaaatatatcaataagcattatgatttgttcatcttggatgaatcacatacgtataatctgatgaacaatacagcagttacaagatttttagcgtattatcctccgatgatgtgttattttttaactgctacacctagaccatctaaccgaatttattgtaacagtattattaatattgccaagttatccaatctaaaaaaaactatctatgcagtagatagtttttttgagccatattccacagataatattagacatatggtaaaacgactagatggaccatctaataaatatcatatatataccgagaagttattatctgtagacgagcctagaaatcaacttattcttgataccctggtagaagaattcaagtcaggaactattaatcgcattttagttattactaaactacgtgaacatatggtattattctacaaacgattattagattttttcggaccagaggttgtatttataggagacgcccaaaatagacgtactccagatatggtcaaatcaatcaaggaactaaatagatttatattcgtatccaccttattttattccggtactggtttagatattcctagtttggattcgttgttcatttgctcggcagtaatcaacaatatgcaaatagagcaattactagggagggtatgtcgagaaacagaactattagataggacggtatatgtatttcctaacacatccatcaaagaaataaagtacatgataggaaatttcatgcaacgaattattagtctgtctgtagataaactaggatttaaacaaaaaagttatcggaaacatcaagaatccgatcccacttctgtatgtacaacatcctccagagaagaacgtgtattaaatagaatatttaactcgcaaaatcgttaagaagtttaagcgacgatccgcatgctgcgcaggccagtgtattacccctcatagtattaatataatccaatgatacttttgtgatgtcggaaatcttaaccaatttagactgacaggcagaacacgtcatgcaatcatcatcgtcatcgataactgtagtcttgggcttctttttgcggctcttcattccggaacgcacattggtgctatccatttaggtagtaaaaaataagtcagaatatgccctataacacgatcgtgcaaaacctggtatatcgtctctatctttatcacaatatagtgtatcgacatttttattattattgacctcgtttatcttggaacatggaatgggaacatttttgttatcaacggccacctttgccttaattccagatgttgtaaaattataactaaacagtctatcatcgacacaaatgaaattcttgtttagacgtttgtagtttacgtatgcggctcgttcgcgtctcattttttcagatattgcaggtactataatattaaaaataagaatgaaataacataggattaaaaataaagttatcatgacttctagcgctgatttaactaacttaaaagaattacttagtctgtacaaaagtttgagattttcagattctgcggctatagaaaagtataattctttggtagaatggggaacatctacttactggaaaataggcgtgcaaaaggtagctaatgtcgagacgtcaatatctgattattatgatgaggtaaaaaataaaccgtttaatattgatccgggctattacattttcttaccggtatattttgggagcgtctttatttattcgaagggtaaaaatatggtagaacttggatctggaaactcttttcaaataccagatgatatgcgaagtgcgtgtaacaaagtattagacagcgataacggaatagactttctgagatttgttttgttaaacaatagatggataatggaagatgctatatcaaaatatcagtctccagttaatatatttaaactagctagtgagtacggattaaacatacccaaatatttagaaattgaaatagaggaagacacattatttgacgacgagttatactctattatagaacgctctttcgatgataaatttccaaaaatatccatatcgtatattaagttgggagaacttagacggcaagttgtagactttttcaaattctcattcatgtatattgagtccatcaaggtagatcgtataggagataatatttttattcctagcgttataacaaaatcaggaaaaaagatattagtaaaagatgtagaccatttaatacgatccaaggttagagaacatacatttgtaaaagtaaaaaagaaaaacacattttccattttatacgactatgatggaaacggaacagaaactagaggagaagtaataaaacgaattatagacactataggacgagactattatgttaacggaaagtatttctctaaggttggtagtgcaggcttaaagcaattgactaataaattagatattaatgagtgcgcaactgtcgatgagttagttgatgagattaataaatccggaactgtaaaacgaaaaataaaaaaccaatcagcatttgatttaagcagagaatgtttgggatatccagaagcggattttataacgttagttaataacatgcggttcaaaatagaaaattgtaaggttgtaaatttcaatattgaaaatactaattgtttaaataacccgagtattgaaactatatatggaaactttaaccagttcgtctcaatctttaatgtcgtcaccgatgtcaaaaaaagattattcgagtgaaataatatgcgcctttgatataggtgcaaaaaatcctgccagaactgttttagaagtcaaggataactccgttagggtattggatatatcaaaattagactggagttctgattgggaaaggcgcatagctaaagatttgtcacaatatgaatacactacagttcttctagaacgtcagcctagaaggtcgccgtatgttaaatttatctattttattaaaggctttttatatcatacatcggctgccaaagttatttgcgtctcgcctgtcatgtctggtaattcatatagagatcgaaaaaagagatcggtcgaagcatttcttgattggatggacacattcggattgcgagactccgttccggatagacgcaaattagacgatgtagcggatagtttcaatttggctatgagatacgtattagataaatggaatactaattatacaccttataataggtgtaaatctagaaattacataaaaaaaatgtaataacgttagtaacgccattatggataatctatttacctttctacatgaaatagaagatagatatgccagaactatttttaactttcatctaataagttgcgatgaaataggagatatatatggtcttatgaaagaacgcatttcctcagaggatatgtttgataatatagtgtataataaagatatacatcctgccattaagaaactagtgtattgcgacatccaacttactaaacacattattaatcagaatacgtatccggtatttaacgattcttcacaagtgaaatgttgtcattatttcgacataaactcagataatagcaatattagctctcgtacagtagagatatttgagagggaaaagtcatctcttgtatcatatattaaaactaccaataagaagagaaaggtcaattacggcgaaataaagaaaactgttcatggaggcactaatgcaaattacttttccggtaaaaagtctgacgagtatctgagtactacagttagatccaacattaatcaaccttggatcaaaaccatctctaagaggatgagagttgatatcattaatcactctatagtaacgcgtggaaaaagctctatattacaaactatagaaattatttttactaatagaacatgtgtgaaaatattcaaggattctactatgcacattattctatccaaggacaaggatgaaaaggggtgtatacacatgattgacaaattattctatgtctattataatttatttctgttgttcgaagatatcatccaaaacgagtactttaaagaagtagctaatgttgtaaaccacgtactcacggctacggcattagatgagaaattattcctaattaagaaaatggctgaacacgatgtttatggagttagcaatttcaaaatagggatgtttaacctgacatttattaagtcgttggatcataccgttttcccctctctgttagatgaggatagcaaaataaagttttttaaggggaaaaagctcaatattgtagcattacgatctctggaggattgtataaattacgtgactaaatccgagaatatgatagaaatgatgaaggaaagatcgactattttaaatagcatagatatagaaacggaatcggtagatcgtctaaaagaattgcttctaaaatgaaaaaaaacactaattcagaaatggatcaacgactagggtataagtttttggtgcctgatcctaaagccggagttttttatagaccgttacatttccaatatgtatcgtattctaattttatattgcatcgattgcatgaaatcttgaccgtcaagcggccactcttatcgtttaagaataatacagaacgaattatgatagaaattagcaatgttaaagtgactcctccagattactcacctataatcgcgagtattaaaggtaagagttatgacgcattagccacgttcactgtaaatatctttaaagaggtaatgaccaaagagggtatatccatcactaaaataagtagttatgagggaaaagattctcatttgataaaaattccgctactaataggatacgggaataaaaatccacttgatacagccaagtatcttgttcctaatgtcataggtggagtctttatcaataaacaatctgtcgaaaaagtaggaattaatctagtagaaaagattacaacatggccaaaatttagggttgttaagccaaactcattcactttctcgttttcctccgtatcccctcctaatgtattaccgacaagatatcgccattacaagatatctctggatatatcacaattggaagcgttgaatatatcatcgacaaagacatttataacggtcaatattgttttgctgtctcaatatttatctagagtgagtctagaattcattagacgtagtttatcatacgatatgcctccagaagttgtctatctagtaaacgcgataatagatagtgctaaacgaattactgaatctattactgactttaatattgatacatacattaatgacctggtggaagctgaacacattaaacaaaaatctcagttaacgattaacgagttcaaatatgaaatgctgcataactttttacctcatatgaactatacacccgatcaactaaagggattttatatgatatctttactaagaaagtttctctactgtatcttccacacttctagatatccagatagagattcgatggtttgtcatcgcatcctaacgtacggcaaatattttgagacgttggcacatgatgaattagagaattacataggcaacatccgaaacgatatcatgaacaatcacaagaacagaggcacttacgcggtaaacattcatgtactaacaactcccggacttaatcacgcgttttctagcttattgagtggaaagttcaaaaagtcagacggtagttatcgaacacatcctcactattcatggatgcagaatatttctattcctaggagtgttggattttatccggatcaagtaaagatttcaaagatgttttctgtcagaaaataccatccaagtcaatatctttacttttgttcatcagacgttccggaaagaggtcctcaggtaggtttagtatctcaattgtctgtcttgagttccattacaaatatactaacgtctgagtatttggatttggaaaagaaaatttgtgagtatatcagatcatattataaagatgatataagttactttgaaacaggatttccaatcactatagaaaatgctctagtcgcatctcttaatccaaatatgatatgtgattttgtaactgactttagacgtagaaaacggatgggattcttcggtaacttggaggtaggtattactttagttagggatcacatgaatgaaattcgcattaatattggagcgggaagattagtcagaccattcttggttgtggataacggagagctcatgatggatgtgtgtccggagttagaaagcagattagacgacatgacattctctgacattcagaaagagtttccgcatgtcatcgaaatggtagatatagaacaatttacttttagtaacgtatgtgaatcggttcaaaaatttagaatgatgtcaaaggatgaaagaaagcaatacgatttatgtgactttcctgccgaatttagagatggatatgtagcatcttcactagtgggaatcaatcacaattctggacccagagctattcttggatgtgctcaagctaaacaagctatctcttgtctgagttcggatatacgaaataaaatagacaatggaattcatttgatgtatccagagaggccaatcgtgattagtaaggctttagaaacttcaaagattgcggctaattgcttcggccaacatgttactatagcattaatgtcgtacaaaggtatcaatcaagaggatggaattatcatcaaaaaacaatttattcagagaggcggtctcgatattgttacagccaagaaacatcaagtagaaattccattggaaaactttaataacaaagaaagagataggtctaacgcctattcaaaattagaaagtaatggattagttagactgaatgctttcttggaatccggagacgctatggcacgaaatatctcatcaagaactcttgaagatgattttgctagagataatcagattagctttgatgtttccgagaaatataccgatatgtacaaatctcgcgttgaacgagtacaagtagaacttactgacaaagttaaggtacgagtattaaccatgaaagaaagaagacccattctaggagacaaatttaccactagaacgagtcaaaagggaacagtcgcgtatgtcgcggatgaaacggaacttccatacgacgaaaatggtatcacaccagatgtcattattaattctacatccatcttctctagaaaaactatatctatgttgatagaggttattttaacagccgcatattctgctaagccgtacaacaataagggagaaaaccgacctgtctgttttcctagtagtaacgaaacatccatcgatacatatatgcaattcgctaaacaatgttatgagcattcaaatccgaaattgtccgatgaagaattatcggataaaatcttttgtgaaaagattctctatgatcctgaaacggataagccttatgcatccaaagtattttttggaccaatttattacttgcgtctgaggcatttaactcaggacaaggcaaccgttagatgtagaggtaaaaagacgaagctcattagacaggcgaatgagggacgaaaacgtggaggaggtatcaagttcggagaaatggagagagactgtttaatagcgcatggtgcagccaatactattacagaagttttgaaagattcggaagaagattatcaagatgtgtatgtttgtgaaaattgtggagacatagcagcacaaatcaagggtattaatacatgtcttagatgttcaaaacttaatctctctcctctcttaacaaaaattgataccacgcacgtatctaaagtatttcttactcaaatgaacgccagaggcgtaaaagtcaaattagatttcgaacgaaggcctccttcgttttataaaccattagataaagttgatctcaagccgtcttttctggtgtaatattctagtttggtagtagatacatatcaatatcatcaaattcgagatccgaattataaaatgggcgtggattgttaactatagaatcggacgtctgatattcgaaaatctgtggagtttcaggttttggtggaggtgtaactgctacttgggatactgaagtctgatattcagaaagctgtggatgttctggttcggcatccaccgatggtgtcacatcactaatcggttcggtaacgtctgtggatggaggtgctacttctacagaacctgtagcctcagttgtcaacggagatacatttttaatgcgagaaaatgtataatttggtaatggtttcttatgtggatctgaagaagaggtaagatatctactagaaagataccgatcacgttctagttctcttttgtagaacttaactttttctttctccgcatctagttgatattccaacctcttcacgttactacgttcagattccaattcacgttcgcatgggttacctccgcagtttttacgagcgatttcacgttcagccttcatgcgtctctccctctctctatcgagtttatcagagcagtctttctgaaggcgatcgaactccataaatttctccaacgctttgattgtttccatagatttccgaagttcagcttttaggactgtgattctttttctttcgaattcacagctggatgtacaaccgtttccattaccgccatctctaagtttcttttctagatcggcaacatttcatccccatgccttttacattcctcgagtctactgtcgtcgaaatatcgttccagctccttttcgacatcaataactttagcacgttgtctctcaagctctcttttgtagttatctgattccctggcacgtttaagatcttcatgcaattgagtcagctcttaacttcctctcttgcttcttcgtcatagtacgcgcaatcactgtgagatccattgttaccacgtctacactcggcgagctcgcgtttaagagattcaatttcccgtttgtattggtccatgtttccattgctaccaccattagatttacaggctgctagttgtcgttcgagatcagaaatacgggttttcttggaattgatttcgtcgatgtacttggcatcgaaacacttattaagttctttttccaattctacgattttatttctttcgcgagtcaattccctcctgtagtaactatctgttttgtcagattcacgctctctacgtagactttcttgcaagttactaatttgttccctagcacgtccgagtttagttttatatgctgaatagagttctgattcatcctttgagcagatctctagcgatcgtttaagattcctaattctagtctttagcctatttacctcctcagaagatgttccgttaccgttgcgtttacactcgttaagctgtctatcaagatccatgattctatctctaagacgttgcatctctctttccatatcagcattgctttcattattacgtctgcagtcactcaactgtctttcaatatctgagattctatctctaagacgtcgcatctctctctgtttcggcattggtttcattattacgtttacagtcgttcaactgtctttcaagatctgatattctagattggagtctgctaatctctgtagcattttcacggcattcactcagttgtctttcaagatctgaaattttagattggagtctgctaatctctgtaagatttcctcctccgctctcgatgcagtcggtcaacttattctctagttctctaatacgcgaacgcagtgcatcaacttcttgcgtgtcttcctggttgcgtgtacattcatcgagatctctaacgcgtcgtcgttcttcctcaagttctctgcgtactacagaaagcgtgtccttatcttgttgatatttagcaatttctgattctagagtactgattttgcttacgtagttactaatatttgtcttggccttatcaagatcctccttgtatttgtcgcattccttgatatccctacgaagtctggacagttcccattcgacattacgacgtttatcgatttcagctcggagatcgtcatcgcgttgttttagccacatacgactgagttcaagttctcgttgacaagatccatctacttttccattcctaatagtatccagttccttttctagttctgaacgcatttctcgttccctatcaagcgattctctcaattctcggatagtcttcttatcaatttctaataaatctgaaccatcatctgtcccattttgaatatccctgtgttctttgatctcttttgtaagtcggtcgattctttcggttttataaacagaatccctttccaaagtcctaatcttactgagtttatcactaagttctgcattcaattcggtgagttttctcttggcttcttccaactctgttttaaactctccactatttccgcattcttcctcgcatttatctaaccattcaattagtttattaataactagttggtaatcagcgattcctatagccgttcttgtaattgtgggaacataattaggatcttctaatggattgtatggcttgatagcatcatctttatcattattagggggatggacaaccttaattggttggtcctcatctcctccagtagcgtgtggttcttcaataccagtgttagtaataggcttaggcaaatgcttgtcgtacgcgggcacttcctcatccatcaagtatttataatcgggttctacttcagaatattcttttctaagagacgcgacttcgggagttagtagaagaactctgtttctgtatctatcaacgctggaatcaatactcaagttaaggatagcgaatacctcatcgtcatcatccgtatcttctgaaacaccatcatatgacatttcatgaagtctaacgtattgataaatagaatcagatttagtattaaacagatccttaacctttttagtaaacgcatatgtatattttagatctccagatttcataatatgatcacatgccttaaatgtcagtgcttccatgatataatctggaacactaatgggtgacgaaaaagatacagcaccatatgctacgttgataaataaatctgaaccactaagtagataatgattaatgttaaggaaaagaaaatattcagtgtataggtatgtcttggcgtcatatcttgtactaaacacgctaaacagtttgttaatgtgatcaatttccaatagattaattagagcagcgggaataccaacaaacatattaccacatccgtattttctatgaatatcacatatcatgttaaaaaatcttgatagaagagcgaatatctcgtctgacttaatgagtcgtagttcagcagcaacataagtcataactgtaaatagaacatactttcctgtagtgttgattctagactccacatcaacaccattattaaaaatagttttatatacatctttaatctgctctccgttaatcgtcgaacgttctagtatacggaaacactttgatttcttatctgtagttaatgacttagtgatatcacgaagaatattacgaattacatttcttgtttttcttgagagacctgattcagaactcaactcatcgttccatagtttttctacctcagtggcgaaatctttggagtgcttggtacatttttcaataaggttcgtgacctccatttattataaaaaatttattcaaaacttaactacaatcgggtaattataaaatcgtagatctcccatgtggcggaatactaccatctatcgcatgtggatggacagtaggtaatggccatgggaacagtaatgtttgcatatttatctttcttgccagtattactgcatattgtcccaatgtttcgatgtgatgttctaacctatcaactgccgctgtatcacaacaatagtgtccgatgaaattaagattatgatccaatgtgtttaatatatgattatcaagtcttatacgatccgcgtcttttttgacaggatcaggttcttctacaggaagaagtttcggcctcttatgatattcatgtctgggaaacggtggtctagggtgaggctccggtatcggagtgggttttggattataatcatcatcgtctatgacatcatcttcgacttcgatatttattttgctatcttgatgatgtcctgtatcagttgcattttcagcactcgactgaatattagcgcattcattgtctattattaccatatttctaaacccaaaatgtatgtgttgaacatcagtactatcgttgatgagtcttatagcatgaattcgcttatcgttatcgggtttatcttctgtcaccttagcaattccttttttattaaactctacataatcatatccatttctattgtttgttctaatataaacgagtatagcatcattgctaaatttttcaatagtatcaaaaacagaatatcctaaaccatataatatatattcaggaacactcaaactaaatgtccaggattctcctaaatacgtaaactttaatagtgcgaaatcattcaaaaatctaccacttatagatagatagtacataaatgcgtatagtagtctacctatctctttattatgaaaaccggcattacgatcatatatgtcgtgatatacctgtgatccgtttacgttaaaccataaatacatgggtgatcctataaacatgaatttatttctaattctcagagctatagttaattgaccgtgtaatatttgcttacatgcatacttgatacgcttattaataagatttttatcattgctcgttatttcagaatcgtatatataaggagtaccatcgtgattcttaccagatattatacaaaatactatatataaaatatattgacccacgttagtaatcatataaatgtttaacgttttaaattttgtattcaatgatccattatcatacgctatcatggtcttgtaatattcattctttaaaatataatattgtgttagccattgcattggggctcctaatggagattttttattctcatccattttaggataggctttcataaagtccctaataacttcgtgaataatgtttctatgttttctactgatgcatgtatttgcttcgatttttttatcccatgtttcatctatcatagatttaaacgcagtaatgctcgcaacattaacatcttgaaccgttggtacaattccgttccataaatttataatgttcgccatttatataactcattttttgaatatacttttaattaacaaaagagttaagttactcatatggacgccgtccagtctgaacatcaatctttttagccagagatatcatagccgctcttagagtttcagcgtgattttccaacctaaatagaacttcatcgttgcgtttacaacacttttctatttgttcaaactttgttgttacattagtaatctttttttccaaattagttagccgttgtttgagagtttcctcattgtcgtcttcatcggctttaacaattgcttcgcgtttagcctctggctttttagcagcctttgtagaaaaaaattcagttgctggaattgcaagatcgtcatctccggggaaaagagttccgtccatttaaagtacagattttagaaactgacactctgcgttatttatatttggtacaacacatggattataaatattgatgttaataacatcagaaaatgtaaagtctatacattgttgcatcgtgttaaattttctaatggatctagtattattgggtccaacttctgcctgaaatccaaatatggaagcggatacaaaaccgtttcctggataaaccacacatctccacttttgctttacatcagaaattgtgtcgttgacatcttgaactctcctatctaatgccggtgttccacctatagattttgaatattcgaatgctgcatgagtagcattaaattccttaatattgccataattttcatatattgagtaaccctggataaaaagtaaacacaccgcagccgtcgctaccacaataaaaaaaattgatagagagttcatttataatctattagaagctgacaaaatttttttacacgcatcagacaatgctttaataaatagttcaacatctacttttgtcatatcgaaccgatggtatgattctaacctagaattacatccgaaaaagttgactatgttcatagtcattaagtcattaacaaacaacattccagactctggattataagacgatactgtttcgtcacaattacctaccttaatcatgtgattatgaatattggctattagagcaccttctaagaaatctataatatctttgaaacacgatttaaaatcaaaccacgaatatacttctacgaagaaagttagtttacccataggagaaataactataaatggagatctaaatacaaaatccggatctatgatagttttaacattattatattctctattaaatacctccacatctaaaaatgttaattttgaaactatgtcttcgtttattaccgtacctgaactaaacgctataagctctattgtttgagaactctttaaacgatattcttgaaatacatgtaacaaagtttcctttaactcggtcggtttatctaccatagttacagaatttgtatccttatctataatataataatcaaaatcgtataaagttatataattatcgcgttcagattgggatcttttcaaatagactaaaaaccccatttctctagtaagtatcttatgtatatgtttgtaaaatatcttcatggtgggaatatgctctaccgcagttagccattcctcattgacagcggtagatgtattagacaaaactattccaatgtttaacaagggccattttacgagattattaaatccttgtttgataaatgtagccaatgagggttcgagttcaacgacgattgaattctcttcccgcggatgctgcatgatgaacgacgggatgttgttcgattgatttggaattctttttcgactttttgtttatattaaatattttaaaatttatagcggatagcaattcatgtaccacggataatgtagacgcgtattgcgcatcgatatctttattattagataaatttatcaataaatgtgagaagtttgcctcgttaaggtcttccatttaaatattatataaacatttgtgtttgtaacttattcgtcttttatggaatagttttttactagtaaagctgcaattacacactttgtccgtaaaacataaatataaacaccagcttttatcaatcgttccaaaaagtcgacggcggacatttttaacatggcatctattttaaatacacttaggtttttggaaaaaacatcattttataattgtaacgattcaataactaaagaaaagattaagattaaacataagggaatgtcatttgtattttataagccaaagcattctaccgttgttaaatacttgtctggaggaggtatatatcatgatgatttggttgtattggggaaggtaacaattaataatctaaagatgatgctattttacatggatttatcatatcatggagtgacaagtagtggagcaatttacaaattgggatcgtctatcgatagactttctctaaataggactattgttacaaaagttaataattatgatgatacattttttgacgacgatgattgatcgctattgcacaattttgtttttgtactttctaatatagtgtttaggttctttttcatatgagaatattgatttactaaaatatctatgtttaacttttgttctatgacgtccttatcggcggtatcggtacatatacgtaattcaccttcacaaaatacggagtcttcgataataatagccaatcgattattggatctagctgtctgtatcatattcaacatgtttaatatatcctttcgtttcccctttacaggcatcgatcgtagcatattttccgcgtctgatatggaaatgttaaaactacaaaaatgcgtaatgttagcccgtcctaatattggtacgtgtctataagtttggcatagtagaataatagacgtgtttaaatgccttccaaagtttaagaattctattagagtattgcattttgatagtttatcgcctacatcatcaaaaataagtaaaaagtgtgctgattttttatgattttgtgcgacagcaatacatttttctatgttacttttagttcgtatcagattatattctagagattcctgactactaacgaaattaatatgatttggccaaatgtatccatcataatctgggttataaacgggtgtaaacaagaatatatgtttatattttttaactagtgtagaaaacagagatagtaaatagatagtttttccagatccagatcctcctgttaaaaccattctaaacggcatttttaataaattttctcttgaaaattgtttttcttggaaacaattcataattatatttacagttactaaattaatttgataataaatcaaaatatggaaaactaaggttgttagtagggaggagaacaaagaaggcacatcgtgatataaataacatttattatcatgatgacaccagaaaacgacgaagagcagacatctgtgttctccgctactgtttacggagacaaaattcagggaaagaataaacgcaaacgcgtgattggtctatgtattagaatatctatggttatttcactactatctatgattaccatgtccgcgtttctcatagtgcgcctaaatcaatgcatgtctgctaacgaggctgctattactgacgccgctgttgccgttgctgctgcatcatctactcatagaaaggttgcgtctagcactacacaatatgatcacaaagaaagctgtaatggtttatattaccagggttcttgttatatattacattcagactaccagttattctcggatgctaaagcaaattgcactgcggaatcatcaacactacccaataaatccgatgtcttgactacctggctcattgattatgttgaggatacatggggatctgatggtaatccaattacaaaaactacatccgattatcaagattctgatgtatcacaagaagttagaaagtatttttgtgttaaaacaatgaactaatatttatttttgtacattaataaatgaaatcgcttaatagacaaactgtaagtaggtttaagaagttgtcggtgccggccgctataatgatgatactctcaaccattattagtggcataggaacatttctgcattacaaagaagaactgatgcctagtgcttgcgccaatggatggatacaatacgataaacattgttatttagatactaacattaaaatgtctacagataatgcggtttatcagtgtcgtaaattacgagctagattgcctagacctgatactagacatctgagagtattgtttagtattttttataaagattattgggtaagtttaaaaaagaccaatgataaatggttagatattaataatgataaagatatagatattagtaaattaacaaattttaaacaactaaacagtacgacggatgctgaagcgtgttatatatacaagtctggaaaactggttaaaacagtatgtaaaagtactcaatctgtactatgtgttaaaaaattctacaagtgacaacaaaaaatgaattaataataagtcgttaacgtacgccgccatggacgccgcgtttgttattactccaatgggtgtgttgactataacagatacattgtatgatgatctcgatatctcaatcatggactttataggaccatacattataggtaacataaaaactgtccaaatagatgtacgggatataaaatattccgacatgcaaaaatgctactttagctataagggtaaaatagttcctcaggattctaatgatttggctagattcaacatttatagcatttgtgccgcatacagatcaaaaaataccatcatcatagcatgcgactatgatatcatgttagatatagaagataaacatcagccattttatctattcccatctattgatgtttttaacgctacaatcatagaagcgtataacctgtatacagctggagattatcatctaatcatcaatccttcagataatctgaaaatgaaattgtcgtttaattcttcattctgcatatcagacggcaatggatggatcataattgatgggaaatgcaatagtaattttttatcataaaagttgtaaagtaaataataaaacaataaatattgaactagtagtacgtatattgagcaatcagaaatgatgctggtacctcttatcacggtgaccgtagttgcgggaacaatattagtatgttatatattatatatttgtaggaaaaagatacgtactgtctataatgacaataaaattatcatgacaaaattaaaaaagataaagagttctaattccagcaaatctagtaaatcaactgatagcgaatcagactgggaggatcactgtagtgctatggaacaaaacaatgacgtagataatatttctaggaatgagatattggacgatgatagcttcgctggtagtttaatatgggataacgaatccaatgttatggcgcctagcacagaacacatttacgatagtgttgctggaagcacgctgctaataaataatgatcgtaatgaacagactatttatcagaacactacagtagtaattaatgaaacggagactgttgaagtacttaatgaagataccaaacagaatcctaactattcatccaatcctttcgtaaattataataaaaccagtatttgtagcaagtcaaatccgtttattacagaacttaacaataaatttagtgagaataatccgtttagacgagcacatagcgatgattatcttaataagcaagaacaagatcatgaacacgatgatatagaatcatcggtcgtatcattggtgtgattagtttcctttttataaaattgaagtaatatttagtattattgctgccgtcacgttgtacaaatggagatattccctgtattcggcatttctaaaattagcaattttattgctaataatgactgtagatattatatagatacagaacatcaaaaaattatatctgatgagatcaatagacagatggatgaaacggtacttcttaccaacatcttaagcgtagaagttgtaaatgacaatgagatgtaccatcttattcctcatagattatcgacgattatactctgtattagttctgtcggaggatgtgttatctctatagataatgacatcaatggcaaaaatattctaacctttcccattgatcatgctgtaatcatatccccactgagtaaatgtgtcgtagttagcaagggtcctacaaccatattggttgttaaagcggatatacctagcaaacgattggtaacatcgtttacaaacgacatactatatgtaaacaatctgtcactgattaattatttgccgttgtctgtattcattattagacgagtcaccgactatttggatagacacatatgcgatcagatatttgctaataataagtggtattcccttataaccatcgacgataagcaatatcctattccatcaaactgtataggtatgtcctctgccaagtacataaattctagcatcgagcaagatactttaatccatgtttgtaacctcgagcatccgttcgactcagtatacaaaaaaatgcagtcgtacaattctctacctatcaaggaacaaatattgtacggtagaattgataatataaatatgagcattagtatttctgtggattaatagatttctagtatggggatcattaatcatctctaatctctaaatacctcataaaacgaaaaaaaagctattatcaaatactgtacggaatggattcattctcttctctttttatgaaactctgttgtatatctactgataaaactggaagcaaaaaatctgatagaaagaataagaataagatcaaggattatatggaacacgattattataaaataacaatagttcctggttcctcttccacgtctactagctcgtggtattatacacatgcctagtaatagtctctttgcgttgacggaaagcagactagaaataacaggctaaaatgttcagacaccataatagttcccaacccagataataacagagttccatcaacacattcctttaaactcaatcccaaacccaaaaccgttaaaatgtatccggccaattgatagtagataatgaggtgtacagcgcatgataatttacacagtaaccaaaatgaaaatactttagtaattataagaaatatagacggtaatgtcatcatcaacaatccgataatatgcctgagagtaaacattgacggataaaacaaaaatgctccgcataactctatcatggcaataacacaaccaaatacttgtaagattcctaaattagtagaaaatacaacgaatatcgatgtataagtgatctcgagaaataataagaataaagtaatgcccgtaaagataaacatcaacattgtttggtaatcattaaaccaattagtatgaagttgaactaatttcacagtagattttattccagtgttatcctcgcatgtataagtacctggtaagatatctttatattccataatcaatgagacatcactatctgataacgaatgaagtctagcactagtatgccatttacttaatattgtcgtcttggaagttttattataagttaaaatatcatggttatccaatttccatctaatatactttgtcggattatctatagtacacggaataatgatggtatcattacatgctgtatactctatggtctttgtagttgttataacaaccaacgtatagaggtatatcaacgatattctaactcttgacattttttatttatttaaaatgatacctttgttatttattttattctattttgctaacggtattgaatggcataagtttgaaacgagtgaagaaataatttctacttacttattagacgacgtattatacacgggtgttaatggggcggtatacacattttcaaataataaactaaacaaaactggtttaactaataataattatataacaacatctataaaagtagaggatgcggataaggatacattagtatgcggaaccaataacggaaatcccaaatgttggaaaatagacggttcagacgacccaaaacatagaggtagaggatacgctccttatcaaaatagcaaagtaacgataatcagtcacaacggatgtgtactatctgacataaacatatcaaaagaaggaattaaacgatggagaagatttgacggaccatgtggttatgatttattcacggcggataacgtaattccaaaagatggtttacgaggagcattcgtcgataaagatggtacttatgacaaagtttacattcttttcactgatactatcggctcaaagagaattgtcaaaattccgtatatagcacaaatgtgcctaaacgacgaaggtggtccatcatcattgtctagtcatagatggtcgacgtttctcaaagtcgaattagaatgtgatatcgacggaagaagttatagacaaattattcattctagaactataaaaacagataatgatacgatactatatgtattcttcgatagtccttattccaagtccgcattatgtacctattctatgaataccattaaacaatctttttctacgtcaaaattggaaggatatacaaagcaattgccgtctccagctcctggtatatgtttaccagctggaaaagttgttccacataccacgtttgaagtcatagaacaatataatgtactagatgatattataaagcctttatctaaccaacctatcttcgaaggaccgtctggtgttaaatggttcgatataaaggagaaggaaaatgaacatcgggaatatagaatatacttcataaaagaaaattctatatattcgttcgatacaaaatctaaacaaactcgtagctcgcaagtcgatgcgcgactattttcagtaatggtaactgcgaaaccgttatttatagcagatatagggataggagtaggaatgccacaaatgaaaaaaatacttaaaatgtaatcttaatcgagtacaccacacgacaatgaacaaacataagacagattatgctggttatgcttgctgcgtaatatgcggtctaattgtcggaattatttttacagcgacactattaaaagttgtagaacgtaaattagttcatacaccattaatagataaaacgataaaagatgcatatattagagaagattgtcctactgactggataagctataataataaatgtatccatttatctactgatcgaaaaacctgggaggaaggacgtaatgcatgcaaagctctaaatccaaattcggatctaattaagatagagactccaaacgagttaagttttttaagaagccttagacgaggctattgggtaggagaatccgaaatattaaaccagacaaccccatataattttatagctaagaatgccacgaagaatggaactaaaaaacggaaatatatttgtagcacaacgaatactcccaaactgcattcgtgttacactatataacaattacactacatttttatcataccactacttcggttagatgttttagaaaaaaataaatatcgccgtaccgttcttgtttttataaaaataacaattaacaattatcaaattttttctttaatattttacgtggttgaccattcttggtggtaaaataatctcttagtgttggaatggaatgctgtttaatgtttccgcactcatcgtatattttgacgtatgcagtcacatcgtttacgcaatagtcagactgtagttctatcatgcttcctacatcagaaggaggaacagttttaaagtctcttggttttaatctattaccgttagttttcatgaaatcctttgttttatccacttcacattttaaataaatgtccactatacattcttttgttaattttactagatcgtcatgggtcatagaatttataggttccgtagtccatggatccaaactagcaaacttcgcgtatacggtatcgcgattagtgtatacaccaactgtatgaaaattaagaaaacagtttaataaatcaacagaaatatttaatcctccgtttgatacagatgcgccatatttatggatttcggattcacacgttgtttgtctgaggtgttcgtctagtgttgcttctacgtaaacttcgattcccatatattctttattgtcagaatcgcataccgatttatcatcatacactgtttgaaaactaaatggtatacacatcaaaataataaataataacgagtacattctgcaatattgttatcgtaattggaaaaatagtgttcgagtgagttggattatgtgagtattggattgtatattttattttatattttgtaataagaataaaatgctaatgtcaagtttattccaatagatgtcttattaaaaacatatataataaataacaatggctgaatggcataaaattatcgaggatatctcaaaaaataataagttcgaggatgccgccatcgttgattacaagactacaaagaatgttctagctgctattcctaacagaacatttgccaagattaatccgggtgaaattattcctctcatcactaatcgtaatattctaaaacctcttattggtcagaaatattgtattgtatatactaactctctaatggatgagaacacgtatgctatggagttgcttactgggtacgcccctgtatctccgatcgttatagcgagaactcataccgcacttatatttttgatgggtaagccaacaacatccagacgtgacgtgtatagaacgtgtagagatcacgctacccgtgtacgtgcaactggtaattaaaataaaaagtaatattcatatgtagtgtcaattttaaatgatgatgatgaaatggataatatccatattgacgatgtcaataatgccggtattggcatacagttcatcgatttttagatttcattcagaggatgtggaattatgttatgggcatttgtattttgataggatctataatgtagtaaatataaaatataatccgcatattccatatagatataattttattaatcacacgttaaccgtagatgaactagacgataatgtcttttttacacatggttattttttaaaacacaaatatggttcacttaatcctagtttgattgtctcattatcaggaaacttaaaatataatgatatacaatgctcagtaaatgtatcgtgtctcattaaaaatttggcaacgagtacatctactatattaacatctaaacataagacttattctctacatcggtccacgtgtattactataataggatacgattctattatatggtataaagatataaatgacaagtataatgacatctatgattttactgcaatatgtatgctaatagcgtctacattgatagtgaccatatacgtgtttaaaaaaataaaaatgaactcttaattatgctatgctattagaaatggataaaatcaaaattacggttgattcaaaaattggtaatgttgttaccatatcgtataacttggaaaagataactattgatgtcacacctaaaaagaaaaaagaaaaggatgtattattagcgcaatcagttgctgtcgaagaggcaaaagatgtcaaggtagaagaaaaaaatattatcgatattgaagatgacgatgatatggatgtagaaagcgcgtaatacgatctataaaaataagtatataaatactttttatttactgtactcttactgtgtagtggtgataccctactcgattatttttttaaaaaaaaaatacttattctgattcttctagccatttccgtgttcgtttgaatgccacatcgacgtcaaagataggggagtagttgaaatctagttctgcattgttggtacgcacctcaaatgtagtgttggatatcttcaacgtatagttgttgagtagtgatggttttctaaatagaattctcttcatatcattcttgcacgcgtacatttttagcatccatcttggaatcctagatccttgttctattcccaatggtttcatcaatagaagattaaacatatcgtacgaacacgatggagagtaatcgtagcaaaagtaagcatttcctttaatcttagatcccggatactggatatattttgcagccaacacgtgcatccatgcagcatttcctacatatacccggctatgcaccgcgtcatcatcgactgtacgatacataatgttaccgtgttgcttacattgctcgtaaaagactttcatcaatttgtctccttctccgtaaattccagtgggtcttaggcaacaagtatacaattttgctccattcatgattacggaattattggctttcataaccagttgctcggccatacgtttactttttgcgtatacatgtcctggtgatatatcataaagggtatgctcatggccgatgaatggatcaccgtgtttattgggtcctattgcttccatgctactagtatagatcaaatacttgattcctaggtccacacaagctgccaaaatagtctgtgttccataatagtttactttcatgatttcattatcggtgtattttccaaatacatccactagagcagccgtatgaataatcagatttaccccatctagcgcttctctcaccttatcaaagtcgtttatatcacattgtatatagtttataaccttaactttcgaggttattggttgtggatcttctacaatatctatgactctgatttcttgaacatcatctgcactaattaacagttttactatatacctgcctagaaatccggcaccaccagtaaccgcgtacacggccattgctgccactcataatatcagactacttattctattttactaaataatggctgtttgtataatagaccacgataatatcagaggagttatttactttgaaccagtccatggaaaagataaagttttaggatcagttattggattaaaatccggaacgtatagtttgataattcatcgttacggagatattagtcaaggatgtgattccataggcagtccagaaatatttatcggtaacatctttgtaaacagatatggtgtagcatatgtttatttagatacagatgtaaatatatttacaattattggaaaggcgttatctatttcaaaaaatgatcagagattagcgtgtggagttattggtatttcttacataaatgaaaagataatacattttcttacaattaacgagaatggcgtttgatatatcagttaatgcgtctaaaacaataaatgcattagtttacttttctactcagcaaaataaattagtcatacgtaatgaagttaatgatacacactacactgtcgaatttgatagggacaaagtagttgacacgtttatttcatataatagacataatgacaccatagagataagaggggtgcttccagaggaaactaatattggttgcgcggttagtatgacttacttgtataataagtatagttttaaactgattttagcagaatatataagacacagaaatactatatccggcaatatttattcggcattgatgacactagatgatttggctattaaacagtatggagacattgatctattatttaatgagaaacttaaagtagactccgattcgggactatttgactttgtcaactttgtaaaggatatgatatgttgtgattctagaatagtagtagctctatctagtctagtatctaaacattgggaattgacaaataaaaaatataggtgtatggcattagccgaacatatatctgatagtattccaatatctgagctatctagactacgatacaatctatgtaagtatctacgcggacacactgagagcatagaggataaatttgattattttgaagacgatgattcgtctacatgttctgccgtaaccgacagggaaacggatgtataattttttttatagcgtgaaggatatgataaaaaatataattgttgtatttatcccattccaatcaccttatatgattctgtaacacaataaaggagtcttatagatgtatagaggtcagatactggtttgataaactgtttattccacataagtatgtttgactttatggttagacccgcatactttaacaaatcactgaaaattggagttaggtattgacctctcagaatcagttgccgttctggaacattaaatgtattttttatgatatactccaacgcatttatgtgggcatacaacaagtcattactaatggaatattccaagagttttagttgtctagtatttaacaagagaagagatttcaacagactgtttatgaactcgaatgccgcctcattgtcgcttatattgatgatgtcgaattctcccaatatcatcaccgatgagtagctcatcttgttatcgggatccaagttttctaaagatgtcattaaaccctcgatcatgaatggatttatcatcatcgtttttatgttggacatgagcttagtccgtttgtccacatctatagaagatgatttctgaattatttcatatatctctctctttaactccaggaacttgtcaggatggtctactttaatatgttctcgtctaagagatgaaaatctttggatggttgcacgcgacttttctctaaaggatgacgttgcccaagatcctctcttaaatgaatccatcttatccttggacaagatggacagtctattttccttagatggtttaatatttttgttacccatgatctataaaggtagacctaatcgtctcggatgaccatatatttattttcagttttattatacgcataaattgtaaaaaatatgttaggtttacaaaaatgtctcgtggggcattaatcgtttttgaaggattggacaaatctggaaaaacaacacaatgtatgaacatcatggaatctataccggcaaacacgataaaatatcttaactttcctcagagatccactgtcactggaaaaatgatagatgactatctaactcgtaaaaaaacctataatgatcatatagttaatctattattttgtgcaaatagatgggagtttgcatcttttatacaagaacaactagaacagggaattactttaatagttgatagatacgcattttctggagtagcgtatgccgccgctaaaggcgcgtcaatgactctcagtaagagttatgaatctggattgcctaaacccgacttagttatattcttggaatctggtagcaaagaaattaatagaaacgtcggtgaggaaatttatgaagatgttacattccaacaaaaggtattacaagaatataaaaaaatgattgaagaaggagatattcattggcaaattatttcttctgaattcgaggaagatgtaaagaaggagttgattaagaatatagttatagaggctatacacacggttactggaccagtggggcaactgtggatgtaatagtgaaattacattttttataaatagatgttagtacagtgttataaatggatgaagcatattactctggcaacttggaatcagtactcggatacgtgtccgatatgcataccgaactcgtatcaatatctcaattagttattgccaagatagaaactatagataatgatatattaaacaaggacattgtaaattttatcatgtgtagatcaaacttggataatccatttatctctttcctagatactgtatatactattatagatcaagagatctatcagaccgaattgattaattcattagacgacaatgaaattatcgattgtatagttaataagtttatgagcttttataaggataacctagaaaatatagtagatgctatcattactctaaaatatataatgaataatccagattttaaaactacgtatgcagaagtactcggttccagaatagccgatatagatattaaacaagtgatacgtaagaatatactacaattgtctaataatatccgcgaacgatatttgtgaaaatattaaaaaaaaatactttttttattaaatgacgtcgcttcgcgaatttagaaaattatgctgtgatatatatcacgcatcaggatataaagaaaaatctaaattaattagagactttataacagatagggatgataaatatttgatcattaagctattgcttcccggattagacgatagaatttataacatgaacgataaacaaattataaaattatatagtataatatttaaacaatctcaggaagatatgctacaagatttaggatacggatatataggagacactattaggactttcttcaaagagaacacagaaatccgtccacgagataaaagcattttaactttagaagaagtggatagttttttaactacgttatcatccgtaactaaagaatcgcatcaaataaaattattgactgatgtagcatccgtttgtacatgtaatgatttaaaatgtgtagtcatgcttattgataaagatctaaaaattaaagcgggtcctcggtacgtacttaacgctattagtcctaatgcctatgatgtgtttagaaaatctaataacttgaaagagataatagaaaatgcatctaaacaaaatctagactctatatctatttctgttatgactccaattaatcccatgttagcggaatcgtgtgattctgtcaataaggcgtttaaaaaatttccatcaggaatgtttgcggaagtcaaatacgatggtgaaagagtacaagttcataaaaataataacgagtttgccttctttagtagaaacatgaaaccagtactctctcataaagtggattatctcaaagaatacataccgaaagcatttaaaaaagctacgtctatcgtattggattctgaaattgttcttgtagacgaacataatgtaccgctcccgtttggaagtttaggaatacacaaaaagaaagaatataaaaactctaacatgtgtttgttcgtgtttgactgtttgtactttgatggattcgatatgacggacattccattgtacgaacgaagatcttttctcaaagatgttatggttgaaatacccaatagaatagtattctcagagttgacgaatattagtaacgagtctcagttaactgacgtattggatgatgcactaacgagaaaattagaaggattggtcttaaaagatattaatggagtatacgaaccgggaaagagaagatggttaaaaataaagcgagactatttgaacgagggttccatggcagattctgccgatttagtagtactaggtgcttactatggtaaaggagcaaagggtggtatcatggcagtctttctaatgggttgttacgacgataaatccggtaaatggaagacggttaccaagtgttcaggacacgatgataatacgttaagggagttgcaagaccaattaaagatggttaaaattaacaaggatcccaaaaaaattccagagtggttggtagttaataaaatctatattcccgattttgtagtagaggatccaaaacaatctcagatatgggaaatttcaggagcagagtttacatcttccaagtcccataccgcaaatggaatatccattagatttcctagatttactaggataagagaggataaaacgtggaaagaatctactcatctaaacgatttagtaaacttgactaaatcttaatagttacatacaaactgaaaattaaaataacactatttagttggtggtcgccatggatggtgttattgtatactgtctaaacgcgctagtaaaacatggcgaggaaataaatcatataaaaaatgatttcatgattaaaccatgttgtgaaagagtttgtgaaaaagtcaagaacgttcacatcggcggacaatctaaaaacaatacagtgattgcagatttgccatatctggataatgcggtatccgatgtatgcaattcactgtataaaaagaatgtatcaagaatatccagatttgataaagatagatgacgatgacaagactcctactggtgtatataattattttaaacctaaagatgccattcctgttattatatccataggaaaggatagagatgtttgtgaactattaatctcatctgataaagcgtgtgcgtgtatagagttaaattcatataaagtagccattcttcccatggatgtttccttttttaccaaaggaaatgcatcattgattattctcctgtttgatttctctatcgatgcggcacctctcttaagaagtgtaaccgataataatgttattatatctagacaccagcgtctacatgacgagcttccgagttccaattggttcaagttttacataagtataaagtccgactattgttctatattatatatggttgttgatggatctgtgatgcatgcgatagctgataatagaactcacgcaattattagcaaaaatatattagacaatactacgattaacgatgagtgtagatgctgttattttgaaccacagattaggattcttgatagagatgagatgctcaatggatcatcgtgtgatatgaacagacattgtattatgatgtaggcaaatttggatctagtatgttggggaaatatgaacctgacatgattaagattgctctttcggtggctggtaatttaataagaaatcgagactacattcccgggagacgaggctatagcctctagataatttttttaagcacgaaataaaaaacataattttaaaccaatctatttcatactattttgtgtgatcaccatggacataaagatagatattagtatttctggtgataaatttacggtgactactaggagggaaaatgaagaaagaaaaaaatatctacctctccaaaaagaaaaaactactgatgttatcaaacctgattatcttgagtacgatgacttgttagatagagatgagatgtttactattctagaggaatattttatgtacagaggtctattaggcctcagaataaaatatggacgactctttaacgaaattaaaaaattcgacaatgatgcggaagaacaattcggtactatagaagaactcaagcagaaacttagattaaattctgaagagggagcagataactttatagattatataaaggtacaaaaacaggatatcgtcaaacttactgtatacgattgcatatctatgataggattgtgtgcatgcgtggtagatgtttggagaaatgagaaactgttttctagatggaaatattgtttacgagcgattaaactgtttattaatgatcacatgcttgataagataaaatctatactgcagaatagactagtatatgtggaaatgtcatagaaagttaaaagttaatgagagcaaaaatatataaggttgtattccatatttgttattttttctgtaatagttaaaaaatacattcgatggtctatctatcagattattatgtgttataaggtactttttctcataataaactagagtatgagtaagatagtgtttttcaaaacatataaatctaaaattgatggatgagatatacagctattaatttcgaaaatatattttaatctgataactttaaacatggatttttgatggtggtttaacgttttaaaaaaagattttgttattgtagtatatgataatattaaaagatggatataaagaatttgctgactgcatgtactattttttacattactacattggctacggcagatatacctacttcgtcactgccacacgctccggtaaacggggcatgtgacgagggagaatatcttgataagaggcataatcaatgttgtaatcagtgtccacctggagaatttgccaaggtcagatgtaatggtaacgataacacaaaatgtgaacgctgcccacctcatacatataccgcaatccccaattactctaatggatgtcatcaatgtagaaaatgcccaacaggatcatttgataaggtaaagtgtaccggaacacagaacagtaaatgttcgtgtcttcctggttggtattgcgctactgattcttcacagactgaagattgtcgagattgtataccaaaaaggagatgtccatgcggatactttggtggaatagatgaacaaggaaatcctatttgtaaatcgtgttgtgttggtgaatattgcgactacctacgtaattatagacttgatccatttcctccatgcaaactatctaaatgtaattaattatgattttgatgataatgttaccatacattatatcgctacttggttagtgtattattcagtatgaagacctattaataattacttatcttttgacgatcttgttataattataatataaaaacttatggcatagtaacttataattgctgacgcgataaattcgtaataatctgttttgttcaaaggaatctacaggcataaaaataaaaatataatttataatatactcttacagcgcgccatcatgaataacagcagtaaattaattgctgttattaatggatttagaaatagtggacgattttgtgatattaatatagttattaatgatgaaaggataaacgctcacagactcatcctatctggagcctccgaatatttttccattctgttttccaataattttatcgattctaatgaatacgaagttaatctaagtcatttagattatcaaagtgttaacgatttgatcgattacatttatgggatacctttgagcctaactaacgataacgtgaaatatattctttcaaccgctgattttttacaaattggatctgctattacggagtgtgaaaattacatacttaaaaatctttgttctagaaactgtatcgatttctacatatacgctgataaatataataacaagaaaatagaatcagcgtcgtttaacacaatattacaaaatattttgagactcatcaacgatgaaaactttaaatacttaacagaggaatcaatgataaaaattttaagcgatgatatgttaaatataaaaaatgaggatttcgccccactaattctcattaaatggttagagagtactcaacaaccatgcaccgtcgagttacttaaatgcctcagaatatcattgctttccccacaagttataaaatcactttatagtcatcgactggttagttcaatctacgaatgtataacattcttaaacaatatagcattcttggatgaatcatttcctagataccatagcatcgagttgatatctatcggtataagtaattcgcatgataagatttccataaactgctacaatcataaaaaaaatacatgggaaatgatatcttcacgtagatataggtgtagtttcgcagtggccgtcctggataatattatttatatgatgggtggatatgatcagtccccgtatagaagttcaaaggttatagcgtacaatacatgtacaaattcttggatatatgatataccagagctaaaatatcctcgttctaattgtgggggactggctgatgacgaatacatttattgtataggcggcatacgcgatcaggattcatcgttgacatctagtattgatagatggaagccatcaaaaccatattggcagaagtatgctaaaatgcgcgaaccaaaatgtgatatgggggttgcgatgttaaacggattaatatatgttataggtggaatcgttaaaggtgacacgtgtaccgacgcactagagagtttatcagaagatggatggatgaagcatcaacgtcttccaataaaaatgtccaatatgtcgacgattgttcatgatggcaagatttatatatctggaggttacaacaatagtagtgtagttaatgtaatatcgaatctagtccttagctataattcgatatatgatgaatggaccaaattatcatcattaaacattcctagaattaatcccgctctatggtcagcgcataataaattatatgtaggaggaggaatatctgatgatgttcgaactaatacatctgagacatacgacaaagaaaaagattgttggacattggataatggtcacgtgttaccacgcaattatataatgtataaatgcgaaccgattaaacataaatatccattggaaaaaacacagtacacgaatgattttctaaagtatttggaaagttttataggtagttgatagaacaaaatacataattttgtaaaaataaatcactttttatactaatatgacacgattaccaatacttttgttactaatatcattagtatactctacaccttttcctcagacatctaaaaaaataggtgatgatgcaactctatcatgtaatcgaaataatacaaatgactacgttgttatgagtgcttggtataaggagcccaattccattattcttttagctgctaaaagcgacgtcttgtattttgataattataccaaggataaaatatcttacgactctccatacgatgatctagttacaactatcacaattaaatcattgactgctagagatgccggtacttatgtatgtgcattctttatgacatcgcctacaaatgacactgataaagtagattatgaagaatactccacagagttgattgtaaatacagatagtgaatcgactatagacataatactatctggatctacacattcaccggaaactagttctgagaaacctgattatatagataattctaattgctcgtcggtattcgaaatcgcgactccggaaccaattactgataatgtagaagatcatacagacaccgtcacatacactagtgatagcattaatacagtaagtgcatcatctggagaatccacaacagacgagactccggaaccaattactgataaagaagaagatcatacagtcacagacactgtctcatacactacagtaagtacatcatctggaattgtcactactaaatcaaccaccgatgatacgtacaatgataatgatacagtaccatcaactactgtaggcggtagtacaacctctattagcaattataaaaccaaggactttgtagaaatatttggtattaccgcattaattatattgtcggccgtggcaatattctgtattacgtattatatatgtaataaacgttcacgtaaatacaaaacagagaacaaagtctagatttttgacttacataaatgtctgggatagtaaaatctatcatattgagcggaccatctggtttaggaaagacagccatagccaaaagactatgggaatatatttggatttgtggtgtcccataccactagatttcctcgtcctatggaacgagaaggtgtcgattaccattacgttaacagagaggccatctggaagggaatagccgccggaaactttctagaacatactgagtttttaggaaatatttacggaacttctaaaactgctgtgaatacagcggctattaataatcgtatttgtgtgatggatctaaacatcgatggcgttagaagtcttaaaaatacgtacctaatgccttactcggtgtatataagacctacctctcttaaaatggttgagaccaagcttcgttgtagaaacactgaagcggatgatgagattcatcgtcgtgtgatgttggcaaaaactgacatggatgaggcaggtgaagccggtctattcgacactattattattgaagatgatgtgaatttagcatatagtaagttaattcagatactacaggaccgtattagaatgtattttaacactaattagagacttaagacttaaaacttgataattaataatataactcgtttttatatgtggctatttcaacgtctaatgtattagttaaatattaaaacttaccacgtaaaacttaaaatttaaaatggtatttcattgacagatagatcacacattatgaactttcaaggacttgtgttaactgacaattgcaaaaatcaatgggtcgttggaccattaataggaaaaggtggattcggtagtatttatactactaatgacaataattatgtagtaaaaatagagcccaaagctaacggatcattatttaccgaacaggcattttatactagagtacttaaaccatccgttatcgaagaatggaaaaaatctcacaatataaagcacgtaggtcttatcacgtgcaaggcatttggtctatacaaatccattaatgtggaatatcgattcttggtaattaatagattaggtgcagatctagatgcggtgatcagagccaataataatagattaccaaaaaggtcggtgatgttgatcggaatcgaaatcttaaataccatacaatttatgcacgagcaaggatattctcacggagatattaaagcgagtaatatagtcttggatcaaatagataagaataaattatatctagtggattacggattggtttctaaattcatgtctaacggcgaacatgttccatttataagaaatccaaataaaatggataacggtactctagaatttacacctatagattcgcataaaggatacgttgtatctagacgtggagatctagaaacacttggatattgtatgattagatggttgggaggtatcttgccatggactaagatatctgaaacaaagaattgtgcattagtaagtgccacaaaacagaaatatgttaacaatactgcgactttgttaatgaccagtttgcaatatgaacctagagaattgctgcaatatattaccatggtaaactctttgacatattttgaggaacccaattacgacaagtttcggcacatattaatgcagggtgtatattattaagtgtggtgtttggtcgataaaaattaaaaaataacttaatttattattgatctcgtgtgtacaaccgaaatcatggcgatgttttacgcacacgctctcggtgggtacgacgagaatcttcatgcctttcctggaatatcatcgactgttgccaatgatgtcagaaaatattctgttgtgttagtttataataacaagtatgacattgtaaaagacaaatatatgtggtgttacagtcaggtgaacaagagatatattggagcactgctgcctatgtttgagtgcaatgaatatctacaaattggagatccgatccatgatcaagaaggaaatcaaatctctatcatcacatatcgccacaaaaactactatgctctaagcggaatcgggtacgagagtctagacttgtgtttggaaggagtagggattcatcatcacgtacttgaaacaggaaacgctgtatatggaaaagttcaacatgattattctactatcaaagagaaggccaaagaaatgaatgcacttagtccaggacctatcatcgattaccacgtctggataggagattgtatctgtcaagttactgctgtggacgtacatggaaaggaaattatgagaatgagattcaaaaagggtgcggtgcttccgatcccaaatctggtaaaagttaaacttggggagaatgatacagaaaatctttcttctactatatcggcggcaccatcgaggtaaccacctctctggaagacagcgtgaataatgtactcatgaaacgtttggaaactatacgccatatgtggtctgttgtatatgatcattttgatattgtgaatggtaaagaatgctgttatgtgcatacgcattcatctaatcaaaatcctataccgagtactgtaaaaacaaatttgtacatgaagactatgggatcatgcattcaaatggattccatggaagctctagagtatcttagcgaactgaaggaatcaggtggatggagtcccagaccagaaatgcaggaatttgaatatccagatggagtggaagacactgaatcaattgagagattggtagaggagttcttcaatagatcagaacttcaggctggtgaatcagtcaaatttggtaattctattaattgttaaacatacatctgtttcagctaagcaactaagaacacgtatacggcagcagcttccttctatactctcatcttttaccaacacaaagggtggatatttgttcattggagttgataataatacacacaaagtatttggattcacggtgggttacgactacctcagactgatagagaatgatatagaaaagcatatcaaaagactttgtgttgtgtatttctgtgagaagaaagaggacatcaagtacgcgtgtcgattcatcaaggtatataaacctggggatgaggctacctcgacatacgtgtgcgctatcaaagtggaaagatgctgttgtgctgtgtttgcagattggccagaatcatggtatatggatactaatggtatcaagaagtattctccagatgaatgggtgtcacatataaaattttaattaatgtaactatagagaacaaataataaggttgtaatatcatatagacaataactaacaattaattagtaactgttatctcttttttaattaaccaactaactatatacctattaatacatcgtaattatagttcttaacatctattaatcattaattcgcttctttaattttttataaactaacattgttaattgaaaagggataacatgttacagaatataaattatatatggatttttttaaaaaggaaatacttgactggagtatatatttatctcttcattatatagcacgcgtgttttccaatttttccacatcccatataatacaggattataatctcgttcgaacatacgagaaagtggataaaacaatagttgattttttatctaggttgccaaatttattccatattttagaatatggggaaaatattctacatatttattctatggatgatgctaatacgaatattataattttttttctagatagagtattaaatattaataagaacgggtcatttatacacaatctcgggttatcatcatccattaatataaaagaatatgtatatcaattagttaataatgatcatccagataataggataagactaatgcttgaaaatggacgtagaacaagacattttttgtcctatatatcagatacagttaatatctatatatgtattttaataaatcatggattttatatagatgccgaagacagttacggttgtacattattacatagatgtatatatcactataagaaatcagaatcagaatcatacaatgaattaattaagatattgttaaataatggatccgatgtagataaaaaagatacgtacggaaacacaccttttatcctattatgtaaacacgatatcaacaacgtggaattgtttgagatatgtttagagaatgctaatatagactctgtagactttaatagatatacacctcttcattatgtctcatgtcgtaataaatatgattttgtaaagttattaatttctaaaggagcaaatgttaatgcgcgtaataaattcggaactactccattttattgtggaattatacacggtatctcgcttataaaactatatttggaatcagacacagagttagaaatagataatgaacatatagttcgtcatttaataatttttgatgctgttgaatctttagattatctattatccagaggagttattgatattaactatcgtactatatacaacgaaacatctatttacgacgctgtcagttataatgcgtataatacgttggtctatctattaaacaaaaatggtgattttgagacgattactactagtggatgtacatgtatttcggaagcagtcgcaaacaacaacaaaataataatggaagtactattgtctaaacgaccatctttgaaaattatgatacagtctatgatagcaattactaaacataaacagcataatgcagatttattgaaaatgtgtataaaatatactgcgtgtatgaccgattatgatactcttatagatgtacagtcgctacagcaatataaatggtatattttaagatgtttcgatgaaatagatatcatgaagagatgttatataaaaaataaaactgtattccaattagttttttgtatcaaagacattaatactttaatgagatacggtaaacatccttctttcgtgaaatgcactagtctcgacgtatacggaagtcgtgtacgtaatatcatagcatctattagatatcgtcagagattaattagtctattatccaagaagctggatcctggagataaatggtcgtgttttcctaacgaaataaaatataaaatattggaaaactttaacgataacgaactatccacatatctaaaaatcttataaacattattaaaatataaaatctaagtaggataaaatcacactacatcattgtttccttttagtgctcgacagtgtatactatttttaacgctcataaataaaaatgaaaacgatttccgttgttacgttgttatgcgtactacctgctgttgtttattcaacatgtactgtacccactatgaataacgctaaattaacgtctaccgaaacatcgtttaatgataaccagaaagttacgtttacatgtgatcagggatatcattctttggatccaaatgctgtctgtgaaacagataaatggaaatacgaaaatccatgcaaaaaaatgtgcacagtttctgattatgtctctgaactatataataaaccgctatacgaagtgaattccaccatgacactaagttgcaacggcgaaacaaaatattttcgttgcgaagaaaaaaatggaaatacttcttggaatgatactgttacgtgtcctaatgcggaatgtcaacctcttcaattagaacacggatcgtgtcaaccagttaaagaaaaatactcatttggggaatatatgactatcaactgtgatgttggatatgaggttattggtgcttcgtacataagttgtacagctaattcttggaatgttattccatcatgtcaacaaaaatgtgatatgccgtctctatctaacggattaatttccggatctacattttctatcggtggcgttatacatcttagttgtaaaagtggttttacactaacggggtctccatcatccacatgtatcgacggtaaatggaatcccatactcccaatatgtgtacgaactaacgaaaaatttgatccagtggatgatggtcccgacgatgagacagatttgagcaaactctcgaaagacgttgtacaatatgaacaagaaatagaatcgttagaagcaacttatcatataatcatagtggcgttgacaattatgggcgtcatatttttaatctccgttatagtattagtttgttcctgtgacaaaaataatgaccaatataagttccataaattgctaccgtaaatataaatccgttaaaataattaataatttaataacaaacaagtatcaaaagattaaagacttatagctagaatcaattgagatgtcttcttcagtggatgttgatatctacgatgccgttagagcatttttactcaggcactattataacaagagatttattgtgtatggaagaagtaacgccatattacataatatatacaggctatttacaagatgcgccgttataccgttcgatgatatagtacgtactatgccaaatgaatcacgtgttaaacaatgggtgatggatacacttaatggtataatgatgaatgaacgcgatgtttctgtaagcgttggcaccggaatactattcatggaaatgtttttcgattacaataaaaatagtatcaacaatcaactaatgtatgatataattaatagcgtatctataattctagctaatgagagatatagaagcgcttttaacgacgatggtatatacatccgtagaaatatgattaacaagttgtacggatacgcatctctaactactattggcacgatcgctggaggtgtttgttattatctgttgatgcatctagttagtttgtataaataattatttcaatatactagttaaaattttaagattttaaatgtataaaaaactaataacgtttttatttgtaataggtgcattagcatcctattcgaataatgagtacactccgtttaataaactgagtgtaaaactctatatagatggagtagataatatagaaaattcatatactgatgataataatgaattggtgttaaattttaaagagtacacaatttctattattacagagtcatgcgacgtcggatttgattccatagatatagatgttataaacgactataaaattattgatatgtataccattgactcgtctactattcaacgcagaggtcacacgtgtagaatatctaccaaattatcatgccattatgataagtacccttatattcacaaatatgatggtgatgagcgacaatattctattactgcagagggaaaatgctataaaggaataaaatatgaaataagtatgatcaacgatgatactctattgagaaaacatactcttaaaattggatctacttatatatttgatcgtcatggacatagtaatacatattattcaaaatatgatttttaaaaatttaaaatatattatcacttcagtgacagtagtcaaataacaaacaacaccatgagatatattataattctcgcagttttgttcattaatagtatacatgctaaaataactagttataagtttgaatccgtcaattttgattccaaaattgaatggactggggatggtctatacaatatatcccttaaaaattatggcatcaagacgtggcaaacaatgtatacaaatgtaccagaaggaacatacgacatatccgcatttccaaagaatgatttcgtatctttctgggttaaatttgaacaaggcgattataaagtggaagagtattgtacgggactatgcgtcgaagtaaaaattggaccaccgactgtaacattgactgaatacgacgaccatatcaatttgtacatcgagcatccgtatgctactagaggtagcaaaaagattcctatttacaaacgcggtgacatgtgtgatatctacttgttgtatacggctaacttcacattcggagattctaaagaaccagtaccatatgatatcgatgactacgattgcacgtctacaggttgcagcatagactttgtcacaacagaaaaagtgtgcgtgacagcacagggagccacagaagggtttctcgaaaaaattactccatggagttcgaaagtatgtctgacacctaaaaagagtgtatatacatgcgcaattagatccaaagaagatgttcccaatttcaaggacaaaatggccagagttatcaagagaaaatttaatacacagtctcaatcttatttaactaaatttctcggtagcacatcaaatgatgttaccacttttcttagcatgcttaacttgactaaatattcataactaatttttattaatgatacaaaaacgaaataaaactgcatattatacactggttaacgcccttataggctctaaccattttcaagatgaggtccctgattatagtccttctgttcccctctatcatctactccatgtctattagacgatgtgagaagactgaagaggaaacatggggattgaaaatagggttgtgtataattgccaaagatttctatcccgaaagaactgattgcagtgttcatctcccaactgcaagtgaaggattgataactgaaggcaatggattcagggatatacgaaacaccgataaattataaaaaaagcaatgtgtccgctgtttccgttaataatactattttcgtaactggcggattattcataaataactctaatagcacgatcgtggttaacaatatggaaaaacttgacatttataaagacaaacaatggtcgattatagaaatgcctatggctagggtatatcacggcattgactcgacatttggaatgttatattttgccggaggtctatccgttaccgaacaatatggtaatttagagaaaaacaacgagatatcttgttacaatcctagaacgaataagtggtttgatatttcatatactatttataagatatccatatcatcattgtgtaaactaaataacgtcttctatgtatttagtaaggacattggatatgtggaaaagtatgatggtgcatggaagttagtacatgatcgtctccccgctataaaggcattatcaacttctccttattgattgaaaatgaaaatataaatagtttttatgtatagcagtattaccctatagttttattgcttactactaacatggatacagatgttacaaatgtagaagatatcataaatgaaatagatagagagaaagaagaaatactaaaaaatgtagaaattgaaaataataaaaacattaacaagaatcatcccaatgaatatattagagaagcactcgttattaataccagtagtaatagtgattccattgataaagaagttatagaatgtatcagtcacgatgtaggaatatagatcatatctactaatttttataatcgatacaaaacataaaaaacaactcgttattacatagcaggcatggaatccttcaagtattgttttgataacgatggcaagaaatggattatcggaaatactttatattctggtaattcaatactatataaggtcagaaaaaatttcactagttcgttctacaattacgtaatgaagatagatcacaaatcacacaagccattgttgtctgaaatacgattctatatatctgtattggatcctttgactatcgacaactggacacgggaacgtggtataaagtatttggctattccagatctgtatggaattggagaaaccgatgattatatgttcttcgttataaagaattcgggaagagtattcgccccaaaggatactgaatcagtcttcgaagcatgcgtcactatgataaacacgttagagtttatacactctcaaggatttacccatggaaaaatagaaccgaggaatatactgattagaaataaacgtctttcactaattgactattctagaactaacaaactatacaagagtggaaactcacatatagattacaacgaggacatgataacttcaggaaatatcaattatatgtgtgtagacaatcatcttggagcaacagtttcaagacgaggagatttagaaatgttgggatattgcatgatagaatggttcggtggcaaacttccatggaaaaacgaaagtagtataaaagtaataaaacaaaaaaaagaatataaaaaatttatagctactttctttgaggactgttttcctgaaggaaatgaacctctggaattagttagatatatagaattagtatacacgttagattattctcaaactcctaattatgacagactacgtaaactgtttatacaagattgaaattatattcttttttttatagagtgtggtagtgttacggatatctaatattaatattagactatctctatcgcgctacacgaccaatatcgattactatggatatcttctatgaaaggagagaatgtatttatttctccagcgtcaatctcgtcagtattgacaatactgtattatggagctaatggatccactgctgaacagctatcaaaatatgtagaaacggaggagaacacggataaggttagcgctcagaatatctcattcaaatccatgaataaagtatatgggcgatattctgccgtgtttaaagattcctttttgagaaaaattggcgataagtttcaaactgttgacttcactgattgtcgcactatagatgcaatcaacaagtgtgtagatatctttactgaggggaaaatcaatccactattggatgaaccattgtctcctagcaattagtgccgtatactttaaagcaaaatggttgacgccattcgaaaaggaatttaccagtgattatcccttttacgtatctccgacggaaatggtagacgtaagtatgatgtctatgtacggcaaggcatttaatcacgcatctgtaaaagaatcattcggcaacttttcaatcatagaactgccatatgttggagatactagtatgatggtcattcttccagacaagattgatggattagaatccatagaacaaaatctaacagatacaaattttaagaaatggtgtgactttatggatgctatgtttatagatgttcacattcccaagtttaaggtaacaggctcgtataatctggtggatactctagtaaagtcaggactgacagaggtgttcggttcaactggagattatagcaatatgtgtaatttagatgtgagtgtcgacgctatgatccacaaaacgtatatagatgtcaatgaagagtatacagaagcagctgcagcaacttctgtactagtggcagactgtgcatcaacaattacaaatgagttctgtgcagatcatccgttcatctatgtgattaggcatgttgatggaaaaattcttttcgttggtagatattgctctccgacaactaattgttaaccattttttttaaaaaaaatagaaaaaacatgtggtattagtgcaggtcgttgttcttccaattgcaattggtaagatgacggccaactttagtacccacgtcttttcaccacagcactgtggatgtgacagactgaccagtattgatgacgtcaaacaatgtttgactgaatatatttattggtcgtcctatgcataccgcaacaggcaatgcgctggacaattgtattccacactcctctcttttagagatgatgcggaattagtgttcatcgacattcgcgagctggtaaaaaatatgccgtgggatgatgtcaaagattgtacagaaatcatccgttgttatataccggatgagcaaaaaaccatcagagagatttcggccatcatcggactttgtgcatatgctgctacttactggggaggtgaagaccatcccactagtaacagtctgaacgcattgtttgtgatgcttgagatgctaaattacgtggattataacatcatattccggcgtatgaattgatgagttgtacatcttgacattttctttcttctcttctccctttcttctcttctcccttcctccctcttctccctttcccagaaacaaacttttttacccactataaaataaaatgagtatactacctgttatatttctttctatatttttttattcttcattcgttcagacttttaacgcgcctgaatgtatcgacaaagggcaatattttgcatcattcatggagttagaaaacgagccagtaatcttaccatgtcctcaaataaatacgctatcatccggatataatatattagatattttatgggaaaaacgaggagcggataatgatagaattataccgatagataatggtagcaatatgctaattctgaacccgacacaatcagactctggtatttatatatgcattaccacgaacgaaacctactgtgacatgatgtcgttaaatttgacaatcgtgtctgtctcagaatcaaatatagattttatctcgtatccacaaatagtaaatgagagatctactggcgaaatggtatgtcccaatattaatgcatttattgctagtaacgtaaacgcagatattatatggagcggacatcgacgccttagaaataagagacttaaacaacggacacctggaattattaccatagaagatgttagaaaaaatgatgctggttattatacatgtgttttagaatatatatacggtggcaaaacatataacgtaaccagaattgtaaaattagaggtacgggataaaataataccttctactatgcaattaccagatggcattgtaacttcaataggtagtaatttgactattgcatcgttgagacctcccacaacggatgcagacgtcttttggataagtaatggtatgtattacgaagaagatgatggggacggaaacggtagaataagtgtagcaaataaaatctatatgaccgataagagacgtgttattacatcccggttaaacattaatcctgtcaaggaagaagatgctacaacgtttacgtgtatggcgtttactattcctagcatcagcaaaacagttactgttagtataacgtgaatgtatgttgttacatttccatgtcaattgagtttataagaatttttatacattatcttccaacaaacaattgacgaacgtattgctatgattaactcccacgatactatgcatattattaatcattaacttgcagactatacctagtgctattttgacatactcatgttcttgtgtaattgcggtatctatattattaaagtacgtaaatctagctatagttttattatttaattttagataatataccgtctccttatttttaaaaattgccacatcctttattaaatcatgaatgggaatttctatgtcatcgttagtatattgtgaacaacaagagcagatatctataggaaagggtggaatgcgatacattgatctatgtagttttaaaacacacgcgaactttgaagaatttatataaatcattccatcgatacatccttctatgttgagatgtatatatccaggaattcgtttattaatatcgggaaatgtataaactaaaacattgcccgaaagcggtgcctctatctgcgttatatccgttcttaacttacaaaatgtaaccaatacctttgcatgacttgttttgttcggcaacgttagtttaaacttgacgaatggattaattacaatagcatgatccgcgcatctattaagtttttttactttaacgcccttgtatgtttttacagagactttatctaaatttctagtgcttgtatgtgttataaatataacgggatatagaaccgaatcacctaccttagatacccaattacattttatcagatccagataataaacaaattttgtcgccctaactaattctatattgttatatattttacaattggttatgatatcatgtaataacttggagtctaacgcgcatcgtcgtacgtttatacaattgtgatttagtgtagtatatctacacatgtatttttccgcactatagtattctggactagtgataaaactatcgttatatctatcttcaatgaactcatcgagatattgctctctgtcatattcatacacctgcataaactttctagacatcttacaatccgtgttattttaggatcatatttacatatttacgggtatatcaaagatgttagattagttaatgggaatcgtctataataatgaatattaaacaattatatgaggacttttaccacaaagcatcataaaaatgagtcgtcgtctgatttatgttttaaatatcaaccgcaaatcaactcataaaatacaagagaatgaaatatatacatattttagtcattgcaatatagaccatacttctacagaacttgattttgtagttaaaaactatgatctaaacagacgacaacctgtaactgggtatactgcactacactgctatttgtataataattactttacaaacgatgtactgaagatattattaaatcatggagtggatgtaacgatgaaaaccagtagcggacgtatgcctgtttatatattgcttactagatgttgtaatatttcacatgatgtagtgatagatatgatagacaaagataaaaaccacttattacatagagactattccaacctattactagagtatataaaatctcgttacatgttattaaaggaagaggatatcgatgagaacatagtatccactttattagataagggaatcgatcctaactttaaacaagacggatatacagcgttacattattattatttgtgtctcgcacacgtttataaaccaggtgagtgtagaaaaccgataacgataaaaaaggccaagcgaattatttctttgtttatacaacatggagctaatctaaacgcgttagataattgtggtaatacaccattccatttgtatcttagtattgaaatgtgtaataatattcatatgactaaaatgctgttgacttttaatccgaatttcgaaatatgtaataatcatggattaacgcctatactatgttatataacttccgactacatacaacacgatattcttgttatgttaatacatcactatgaaacaaatgttggagaaatgccgatagatgagcgtcgtatgatcgtattcgagtttatcaaaacatattctacacgtccggcagattcgataacttatttgatgaataggtttaaaaatataaatatttatacccgctatgaaggaaagacattattacacgtagcatgtgaatataataatacacacgtaatagattatcttatacgtatcaacggagatataaatgcgttaaccgacaataacaaacacgctacacaactcattatagataacaaagaaaattccccatataccattaattgtttactgtatatacttagatatattgtagataagaatgtgataagatcgttggtggatcaacttccatctctacctatcttcgatataaaatcatttgagaaattcatatcctactgtatacttttagatgacacattttacgataggcacgttaagaatcgcgattctaaaacgtatcgatacgcattttcaaaatacatgtcgtttgataaatacgatggtataataactaaatgtcacgacgaaacaatgttactcaaactgtccactgttctagacactacactatatgcagttttaagatgtcataattcgagaaagttaagaagatacctcaacgagttaaaaaaatataataacgataagtcctttaaaatatattctaatattatgaatgagagataccttaatgtatattataaagatatgtacgtgtcaaaggtatatgataaactatttcctgttttcacagataaaaattgtctactaacattactaccttcagaaattatatacgaaatattatacatgctgacaattaacgatctttataatatatcgtatccacctaccaaagtatagttgtatttttctcatgcgatgtgtgtaaaaaaactgatattatataaatattttagtgccgtataataaagatgacgatgaaaatgatggtacatatatatttcgtatcattattgttattgctattccacagttacgccatagacatcgaaaatgaaatcacagaattcttcaataaaatgagagatactctaccagctaaagactctaaatggttgaatccagcatgtatgttcggaggcacaatgaatgatatagccgctctaggagagccattcagcgcaaagtgtcctcctattgaagacagtcttttatcgcacagatataaagactatgtggttaaatgggagaggctagaaaagaatagacggcgacaggtttctaataaacgtgttaaacatggtgatttatggatagccaactatacatctaaattcagtaaccgtaggtatttgtgcaccgtaactacaaagaatggtgactgtgttcagggtatagttagatctcatattaaaaaacctccttcatgcattccaaaaacatatgaactaggtactcatgataagtatggcatagacttatactgtggaattctttacgcaaaacattataataatataacttggtataaagataataaggaaattaatatcgacgacattaagtattcacaaacgggaaaggaattaattattcataatccagagttagaagatagcggaagatacgactgttacgttcattacgacgacgttagaatcaagaatgatatcgtagtatcaagatgtaaaatacttacggttataccgtcacaagaccacaggtttaaactaatactagatccgaaaatcaacgtaacgataggagaacctgccaatataacatgcactgctgtgtcaacgtcattattgatcgacgatgtactgattgaatgggaaaatccatccggatggcttataggattcgattttgatgtatactctgttttaactagtagaggcggtatcaccgaggcgaccttgtactttgaaaatgttactgaagaatatataggtaatacatataaatgtcgtggacacaactattattttgaaaaaacccttacaactacagtagtattggagtaaatacacaatgcatttttatatacattactgaattattattactgaattattattactgaattattattaattatatcgtatttgtgctatagaatggatgaagatacgcgactatctaggtatttgtatctcaccgatagagaacatataaatgtagactctattaaacagttgtgtaaaatatcagatcctaatgcatgttatagatgtggatgtacggctttacatgagtacttttataattatagatcagtcaacggaaaatacaagtatagatacaacggttactatcaatattattcatctagcgattatgaaaattataatgaatattattatgatagaactggtatgaacagtgagagtgataatatatcaatcaaaacagaatatgaattctatgatgaaacacaagatcaaagtacacaactagtaggttacgacattaaactcaaaaccaatgaggatgattttatggctatgatagatcagtgggtgtccatgattatatagatgaatcaattaataaagtagtatatggaagagagtctcacgtaagatggcgggatatatggcaagaacataatgatggcgtatacagtataggaaaggagtgcatagataatatatacgaagacaaccataccgtagacgaattctacaagatagacagcgtatcagatgtagatgacgcggaacacatatctcctataactaatgatgtatctacacaaacatgggaaaagaaatcagagttagatagatacatggaatcgtatcctcgtcatagatatagtaaacattctgtatttaagggattttctgataaagttagaaaaaatgatttagacatgaatgtggtaaaagaattactttctaacggtgcatctctaacaatcaaggatagcagtaataaggatccaattgctgtttattttagaagaacgataatgaatttagaaatgattgatattattaacaaacatacaactattgatgaacgaaagtatatagtacactcctatctaaaaaattatagaaatttcgattatccatttttcaggaagttagttttgactaataaacattgtctcaacaattattataatataagcgacagcaaatatggaacaccgctacatatattggcgtctaataaaaaattaataactcctaattacatgaagttattagtgtataacggaaatgatataaacgcacgaggtgaagatacacaaatgcgaaccaactcagaaatggttgttgtattattgggtgtataggtattattagctatgtaccaatttaccaaccctcttaatattgattgataatcacatcggttatccaatcaataactaaattgtagtgtatatatagaccatatatgtttctatttttttgacagttacgtatagtttcagtaagttttgattgttgtattcctgtatctctagataagttagtcatatagtcccttccggcgatacgttttttccaagcccgaaattgattagccaaatgtgtatttatttttgtgatattgatataatatttcggataatgcatactgttagtcttatatcatttggttcatctatgtattgtaatattgttacatgatctatagatgatgtattgattttggcaggatcgaattccatatccgcgactaaacagtgaaaaaaatgtaaatactttttaaattttaaattagtaaaacttttttttattttttatgattccaaaaatactgaatacaaagtcctaaattataaatatggagatcatactaccacaacttattattatgtatacaaggccggtgtaatagatagatatatataattctattacaccggcagacaattaccgaccggtatttgtcgttaccaacataccgtataatatgtaatatacaattccataacccattgacagttgttatacatcaaaattgcaattcttttgattacgatgttataagaatgtagttaattgatgtatgatgttaatgtgtcctctttcctcttataacatcgtaatcaaaaacttttttataatatatacctaataatgtgtcttaatagttctcgtgattcgtcaaacaatcattcttataaaatataataaagcaacgtaaaacacataaaaataagcgtaactaataagacaatggatatttacgacgataaaggtctacagactattaaactgtttaataatgaatttgattgtataaggaatgacatcagagaattatttaaacatgtaactgattccgatagtatacaacttccgatggaagacaattctgatattatagaaaatatcagaaaaatactatatagacgattaaaaaatgtagaatgtgttgacatcgataacacaataacttttatgaaatacgatccaaatgatgataataagcgtacgtgttctaattgggtacccttaactaataactatatggaatattgtctagtaatatatttggaaacaccgatatgtggaggcaaaataaaattataccaccctacaggaaatataaagtcggataaggatattatgtttgcaaagactctagactttaaatcaacgaaagtgttaactggacgtaaaacaattgccgttctagacatatccgtttcatataatagatcaatgactactattcactacaacgacgacgttgatatagatatacatactgataaaaatggaaaagagttatgttattgttatataacaatagatgatcattacttggttgatgtggaaactataggagttatagtcaatagatctggaaaatgtctgttagtaaataaccatctaggtataggtatcgttaaagataaacgtataagcgatagttttggagatgtatgtatggatacaatatttgacttttctgaagcacgagagttattttcattaactaatgatgataacaggaatatagcatgggacactgataaactagacgatgatacagatatatggactcccgtcacagaagatgattacaaatttctttctagactagtattgtatgcaaaatctcaatcggatactgtatttgactattatgttcttactggtgatacggaaccacccactgtattcattttcaaggtaactagattttactttaatatgccgaaataaaaaatttttgtataatatctagaggtagaggtattgtttagataaatacaaataacatagatacatcgcatacttagcatttttataaatatacataagacatacactttatacatttttgtaaaaatactcataaaaaaaatttataaaaattatggcacaaccatatcttgtataggtagtttagttcgtcgagtgaacctataaacagataatagacaacacataataatgcctactaatacaagcataataccgggagatgggatatatgacgttgtagtgtttgggttttctgaacgttgatagtctactaatactacatgctgacatctaatgcctgtataaccatgagagcatctacaatacataccgtcaatatctctagcgtggatacagtcaccgtgtaaacaatatccatctccctctggaccgcataatctgatagctggaatatctgttgtagcgtttgtaatttctggcaatgtcgtttcgatagcgttaccactatcggcgaatgatctgattatcatagcagcgaacaacaacatcagataatttatcaacatttttgatggattctgtgtttatgctgtttctcagtgtgtgtttatgacaagattgggaattttatattattaattcagtaatataaactaataatatattgttaattgtgtaaataatataaaaataacaatacaatattgaatgtgttgctgttaaaaatgtatgtgttaatataatagaataaaataaatgagtatgatcattttagataacgattgattttatcattaccgcttcattcttatattctttgcttacggaacctatatttagaaacatctactaacaattttttatgcttgcattattaatggtatgtaatatgattgattgtgtacgcaataccaatttgttaagtatgaatacggggtacaaacataaattgaaatttaacattatttatttatgatatatatcgttatcgttaggtctataccatggatatctttaaagaactaatcttaaaacaccctgatgaaaatgttttgatttctccagtttccattttatctactttatctattctaaatcatggagcagctggttctacagctgaacaactatcaaaatatatagagaatatgaatgagaatacacccgatgacaataatgatgacatggaggtagatattccgtattgtgcgacactagctaccgcaaataaaatatacggtagcgatagtatcgagttccacgcctccttcctacaaaaaataaaagacgattttcaaactgtaaactttaataatgctaaccaaacaaaggaactaatcaacgaatgggttaagacaatgacaaatggtaaaattaattccttattgactagtccgctatccattaatactcgtatgacagttgttagcgccgtccattttaaagcaatgtggaaatatccattttctaaacatcttacatatacagacaagttttatatttctaagaatatagttaccagcgttgatatgatggtgggtaccgagaataacttgcaatatgtacatattaatgaattattcggaggattctctattatcgatattccatacgagggaaactctagtatggtaattatactaccggacgacatagaaggtatatataacatagaaaaaaatataacagatgaaaaatttaaaaaatggtgtggtatgttatctactaaaagtatagacttgtatatgccaaagtttaaagtggaaatgacagaaccgtataatctggtaccgattttagaaaatttaggacttactaatatattcggatattatgcagattttagcaagatgtgtaatgaaactatcactgtagaaaaatttctacatacgacgtttatagatgttaatgaggagtatacagaagcatcggccgttacaggagtatttacgattaacttttcgatggtatatcgtacgaaggtctacataaaccatccattcatgtacatgattaaagacaccacaggacgtatactttttatagggaaatactgctatccgcaataaatataaacaaatagacttttataaagagtcttcaacgataagtatatcgacatactacttatgctgcgaaagattctgaacgagaacgactatctcaccctcttggatcatatccgcactgctaaatactaaatctccactacactttttatcatcttatgaggaatgattgccttcgtgaaataggaataattagcaccagaatagctatggattattgtggtagagagtgcactattctatgtcgtctactggatgaagatgtgacgtacaaaaaaataaaactagaaattgaaacgtgtcacaacttatcaaaacatatagatagacgaggaaacaatgcgctacattgttacgtctccaataaatgcgatacagacattaagattgttctctcgcggagtcgagagactttgtagaaacaacgaaggattaactccgctaggagtatacagtaagcatagatacgtcaaatctcagattgtgcatctactgatatccagctattcaaattcctctaacgaactcaagtcgaatataaatgatttcgatctgtattcggataatatcgacttacgtctgctaaaatacctaattgtggataaacggatacgtccgtccaagaatacgaattatgcaatcaatggtctcggattggtggatatatacgtaacgacgcctaatccgagaccagaagtattgctatggcttcttaaatcagaatgttacagcaccggttacgtatttcgtacctgtatgtacgacagtgatatgtgtaagaactctcttcattactatatatcgtctcatagagaatctcaatctctatccaaggatgtaattaaatgtttgatcgataacaatgtttccatccatggcagagacgaaggaggatctttacccatccaatactactggtctttctcaaccatagatatagagattgttaaattattattaataaaggatgtggacacgtgtagagtatacgacgtcagccctatattatctaaacaagcgatttagagtaaccccatataatgtagacatggaaatcgttaatcttcttattgagagacgtcatactcttgtcgacgtaatgcgtagtattacttcgtacgattccagagaatataaccactacatcatcgataacattctaaagagatttagacaacaggatgtacaagccatgttgataaactacttacattacggcgatatggtcgttcgatgcatgttagataacggacaacaactatcctctgcacgactactttgttaataataatctcgtcgatgtaaacgtcgtaaggtttatcgtggaaaatatggacacgcggctgtaaatcacgtatcgaacaatggccgtctatgtatgtacggtctgatattatcgagatttaataattgcgggtatcactgttatgaaaccatactgatagatgtatttgatatactaagcaagtacatggatgatatagatatgatcgataactctactatattacgcggtcgatgtcaataatatacaatttgcaaagcggttattggaatatggagcgagtgtcacgctcgataatcaatacggccatccagaaaagcagttaccaaagagaaaacaaaacgaagctagttgatttattactgagttaccatcccactctagagactatgattgacgcatttaatagagatatacgctatctatatcctgaaccattattcgcctgtatcagatacgccttaatcctagatgatgattttccttctaaagtaaagtatgatatcgccggtcgtcataaggaactaaagcgctatagagtagacattaatagaatgaagaatgtctacatatcaggcgtctccatgtttgatatattatttaaacgaagcaaacgccacaaattgagatacgcaaagaatccgacatcaaatggtacaaaaaagaactaacgtccatcattacagaaactgtaaagaacaatgagaggatcgactccatagtggacaacattaatacagacgataacttgatttcgaaattacccatggagatactttattactccattaaataatttatcatggagcgataatgtcctgtttcatttgtttccatgacatattacaaaatcgattccgtccaagatgataaaaacatttaccggcatcataaacacggagtttattttatatgtctcgcataaacattactaaaaaaatatattgttcggttttctttcacatctttaattatgaaaaagtaaatcattatgagatggacgagattgtacgcatcgttcgcgacagtatgtggtacatacctaacgtatttatggacgacggtaagaatgaaggtcacgtttctgtcaacaatgtctgtcatatgtattttacgttctttgatgtggatacatcgtctcatctgtttaagctagttattaaacactgcgatctgaataaacgaggtaactctccattacattgctatacgatgaatacacgatttaatccatctgtattaaagatattgttacaccacggcatgcgtaactttgatagcaaggatgaccactatcaatcgataacaagatctttgatatactaacggacaccattgatgactttagtaaatcatccgatctattgctgtgttatcttagatataaattcaatgggagcttaaactattacgttctgtacaaaggatccgaccctaattgcgccgacgaggatgaactcacttctcttcattactactgtaaacacatatccacgttctacgaaagcaattattacaagttaagtcacactaagatgcgagccgagaagcgattcatctacgcgataatagattatggagcaaacattaacgcggttacacacttaccttcaacagtataccaaacatagtcctcgtgtggtgtatgctcttttatctcgaggagccgatacgaggatacgtaataatcttgattgtacacccatcatggaacgattgtgcaacaggtcatattctcataatgttactcaattggcacgaacaaaaggaagaaggacaacatctactttatctattcataaaacataatcaaggatacactctcaatatactacggtatctattagataggttcgacattcagaaagacgaatactataataccgcctttcaaaattgtaacaacaatgttgcctcatacatcggatacgacatcaaccttccgactaaagacggtattcgacttggtgtttgaaaacagaaacatcatatacaaggcggatgttgtgaatgacatcatccaccacagactgaaagtatctctacctatgattaaatcgttgttctacaagatgtctctccctacgacgattactacgtaaaaaagatactagcctactgcctattaagggacgagtcattcgcggaactacatagtaaattctgtttaaacgaggactataaaagtgtatttatgaaaaatatatcattcgataagatagattccatcatcgtgacataagtcgccttaaagagattcgaatctccgacaccgacctgtatacggtatcacagctatcttaaagccatacattcagacagtcacatttcatttcccatgtacgacgatctcatagaacagtgccatctatcgatggagcgtaaaagtaaactcgtcgacaaagcactcaataaattagagtctaccatcggtcaatctagactatcgtatttgcctccggaaattatgcgcaatatcatctaaacagtatgttgtacggaaagaaccattacaaatattatccatgatagaaagaaaatatctatatgattggagaagtaggaaacaggaacaagacgacgattactacattattaaatcatgaagtccgtattatactcgtatatattgtttctctcatgtataataataaacggaagagatatagcaccgcatgcaccatccgatggaaagtgtaaagacaacgaatacaaacgccataatttgtgtccgggaacatacgcttccagattatgcgatagcaagactaacacacaatgtacgccgtgtggttcgggtaccttcacatctcgcaataatcatttacccgcttgtctaagttgtaacggaagacgcgatcgtgtaacacgactcacaatagaatctgtgaatgctctcccggatattattgtcttctcaaaggatcatccggatgcaaggcatgtgtttcccaaacaaaatgtagaataggatacggagtatccggagacgtcatctgttctccgtgtggtctcggaacatattctcacaccgtctcttccgcagataaatgcgaacccgtacccagtaatacctttaactatatcgatgtggaaattaacctgtatcccgtcaacgacacgtcgtgtactcggacgaccactaccggtctcagcgaatccatctcaacgtcggaactaactattactatgaatcataaagactgtaatcccgtctttcgtgatggatacttctccgttcttaataaggtagcgacttcaggtttctttacaggagaaaggtgtgcactctgaatttcgagattaaatgcaataacaaagattcttcctccaaacagttaacgaaagcaaagaatgatactatcatgccgcattcggagacagtaactctagtgggcgacatctatatactatatagtaataccaatactcaagactacgaaactgatacaatctcttatcatgtgggtaatgttctcgatgtcgatagccatatgcccggtagttgcgatatacataaactgatcactaattccaaacccacccactttttatagtaagtttttcacccataaataataaatacaataattaatttctcgtaaaagtagaaaatatattctaatttattgcacggtaaggaagtagaatcataaagaacagtactcaatcaatagcaattatgaaacaatatatcgtcctggcatgcatgtgcctggcggcagctgctatgcctgccagtcttcagcaatcatcctcatcctcctcctcgtgtacggaagaagaaaacaaacatcatatgggaatcgatgttattatcaaagtcacaaagcaagaccaaacaccgaccaatgataagatttgccaatccgtaacggaaattacagagtccgagtcagatccagatcccgaggtggaatcagaagatgattccacatcagtcgaggatgtagatcctcctaccacttattactccatcatcggtggaggtctgagaatgaactttggattcaccaaatgtcctcagattaaatccatctcagaatccgctgatggaaacacagtgaatgctagattgtccagcgtgtccccaggacaaggtaaggactctcccgcgatcactcatgaagaagctcttgctatgatcaaagactgtgaagtgtctatcgacatcagatgtagcgaagaagagaaagacagcgacatcaagacccatccagtactcgggtctaacatctctcataagaaagtgagttacgaagatatcatcggttcaacgatcgtcgatacaaaatgcgtcaagaatctagagtttagcgttcgtatcggagacatgtgcaaggaatcatctgaacttgaggtcaaggatggattcaagtatgtcgacggatcggcatctgaaggtgcaaccgatgatacttcactcatcgattcaacaaaactcaaagcgtgtgtctgaatcgataactctattcatctgaaattggatgagtagggttaatcgaacgattcagacacaccacgaattaaaaaagtgtaccggacactatattccggtttgcaaaacaaaaatgttcttaactacattcacaaaaagttacctctcgcgacttcttctttttctgtctcaatagtgtgatacgattatgacactattcctattcctattcctatttcctttcagagtatcacaaaaatattaaacctctttctgatggtctcataaaaaaagttttacaaaaatatttttattctctttctctctttgatggtctcataaaaaaagttttacaaaaatatttttattctctttctctctttgatggtctcataaaaaaagttttacaaaaatatttttattctctttctctctttgatggtctcataaaaaaagttttacaaaaatatttttattctctttctctctttgatggtctcataaaaaaagttttacaaaaatatttttattctctttctctctttgatggtctcataaaaaaagttttacaaaaatatttttattctctttctctctttgatggtctcataaaaaaagttttacaaaaatatttttattctctttctctctttgatggtctcataaaaaaagttttacaaaaatatttttattctctttctctctttgatggtctcataaaaaaagttttacaaaaatatttttattctctttctctctttgatggtctcataaaaaaagttttacaaaaatatttttattctctttctctctttgatggtctcataaaaaaagttttacaaaaatatttttattttctttctctctttgatggtctcataaaaaatattaaacctctttctgatggtgtcactaaaatatttttattctcattctcattttctctttctctcttcaatggagtcataaaatatttttattctctttctctcttcgatggtctcacaaaaatattaaacctctttctgatggtgtcactaaaatatttttattctcattctcattttctttttctctcttcaatggagtcataaaatatttttattctctttctctcttcgatggtctcacaaaaatattaaacctctttctgatggagtcgtaaaaaagttttatctctttctctcttcgatggtctcactaaaatattttttattctctttctgatgcatcaactatttcttaaacaataacgtccaacaacatatactcgtcgagcttatcaacatcccctatgcccatctaggttaccagacaattgtatatcataaaataatgtttataatttacacgttaaaatcatataataaaacgtagatcgtataatattttttggtatataaatgatctagtaaaatccatgtaggggatactgctcacattttttctttggtacaaaatttcacacaagtttttatacagacaaattcttgtccatatattttaaaacattgacttttgtactaagaaaaatatctagactaactatctc

SEQ ID NO: 7 - DNA, 187653 bp, Vaccinia virus
  LIVP 4.1.1
agaaagagaataaaaatatttttgtaaaactttttttatgagaccatcaaagagagaaagagaataaaaatatttttgtaaaactttttttatgagaccatcaaagagagaaagagaataaaaatatttttgtaaaactttttttatgagaccatcaaagagagaaagagaataaaaatatttttgtaaaactttttttatgagaccatcaaagagagaaagagaataaaaatatttttgtaaaactttttttatgagaccatcaaagagagaaagagaataaaaatatttttgtaaaactttttttatgagaccatcaaagagagaaagagaataaaaatatttttgtaaaactttttttatgagaccatcaaagagagaaagagaataaaaatatttttgtaaaactttttttatgagaccatcaaagagagaaagagaataaaaatatttttgtaaaactttttttatgagaccatcagaaagaggtttaatatttttgtgatactctgaaaggaaataggaataggaataggaatagtgtcataatcgtatcacactattgagacagaaaaagaagaagtcgcgagaggtaactttttgtgaatgtagttaagaacatttttgttttgcaaaccggaatatagtgtccggtacacttttttaattcgtggtgtgcctgaatcgttcgattaaccctactcatccaatttcagatgaatagagttatcgattcagacacacgctttgagttttgttgaatcgatgagtgaagtatcatcggttgcaccttcagatgccgatccgtcgacatacttgaatccatccttgacctcaagttcagatgattccttgcacatgtctccgatacgaacgctaaactctagattcttgacgcattttgtatcgacgatcgttgaaccgatgatatcttcgtaactcactttcttatgagagatgttagacccgagtactggatgggtcttgatgtcgctgtctttctcttcttcgctacatctgatgtcgatagacacttcacagtctttgatcatagcaagagcttcttcatgagtgatcgcgggagagtccttaccttgtcctggggacacgctggacaatctagcattcactgtgtttccatcagcggattctgagatggatttaatctgaggacatttggtgaatccaaagttcattctcagacctccaccgatgatggagtaataagtggtaggaggatctacatcctcgactgatgtggaatcatcttctgattccacctcgggatctggatctgactcggactctgtaatttccgttacggattggcaaatcttatcattggtcggtgtttggtcttgctttgtgactttgataataacatcgattcccatatgatgtttgttttcttcttccgtacacgaggaggaggatgaggatgattgctgaagactggcaggcatagcagctgccgccaggcacatgcatgccagtacgatatattgtttcataattgctattgattgagtactgttctttatgattctacttccttaccgtgcaataaattagaatatattttctacttttacgagaaattaattattgtatttattatttatgggtgaaaaacttactataaaaagtgggtgggtttggaattagtgatcagtttatgtatatcgcaactaccgggcatatggctatcgacatcgagaacattacccacatgataagagattgtatcagtttcgtagtcttgagtattggtattactatatagtatatagatgtcgcccactagagttactgtctccgaatgcggcatgatagtatcattctttgctttcgttaactgtttggaggaagaatctttgttattgcatttaatctcgaaattcagagtgcacacctttctcctgtaaagaaacctgaagtcgctaccttattaagaacggagaagtatccatcacgaaatacgggattacagtctttatgattcatagtaatagttagttccgacgttgagatggattcgctgagaccggtagtggtcgtccgagtacacgacgtgtcgttaactggatacaggttaatttccacatcgatatagttaaacgtatttctgggtacgggttcgcatttatctgcggaagagacggtgtgagaatatgttccgagaccacacggagaacagatgacgtctccggatactccgtatcctattccacattttgtttgggaaacacatgccttgcatccggatgatcctttgagaagacaataatatccgggagagcattcacagattctattgtgagtcgtgttacacgatcgcgtcttccgttacaacttagacaagcgggtaaatgattattgcgagatgtgaaggtacccgaaccacacggcgtacatcgtgtgttagtcttgctatcgcataatctggaagcgtatgttcccggacacagattatggcgtttgtattcgttgtctttacactttccatcggatggtgcatgcggtgctatatctcttccgtttattattatacatgagagaaacaatatatacgagtataatacggacttcataatttaataatgtagtaatcgttgtcttgttcctgtttcctacttctccaatcatggataatatttgtaatggttctttccgtacaacatactgtttagatgatattgcgcataatttccggaggcaaatacgatagtctagattggccatcgatggtagactctaatttattgagtgctttgtcgacgagtttcgatagatggcactgttctatgagatcgtcgtacatgggaaatgaaatgtgactgtctgaatgtatggctttaagatagctgtgataccgtatacaggtcggtgtcggagattcgaatctctttgaggcgacttatgtcacgatgatggaatctatcttatcgaatgatatatttttcataaatacacttttatagtcctcgtttaaacagaatttactatgtagttccgcgaatgactcgtcccttaataggcagtaggctagtatcttttttacgtagtaatcgtcgtagggagagacatcttgtagaacaacgatttaatcataggtagagatactttcagtctgtggtggatgatgtcattcacaacatccgccttgtatatgatgtttctgttttcaaacaccaagtcgaataccgtctttagtcggaaggttgatgtcgtatccgatgtatgaggcaacattgttgttacaattttgaaaggcggtattatagtattcgtctttctgaatgtcgaacctatctaatagataccgtagtatattgagagtgtatccttgattatgttttatgaatagataaagtagatgttgtccttcttccttttgttcgtgccaattgagtaacattatgagaatatgacctgttgcacaatcgttccatgatgggtgtacaatcaagattattacgtatcctcgtatcggctcctcgagataaaagagcatacaccacacgaggactatgtttggtatactgttgaaggtaagtgtgtaaccgcgttaatgtttgctccataatctattatcgcgtagatgaatcgcttctcggctcgcatcttagtgtgacttaacttgtaataattgctttcgtagaacgtggatatgtgtttacagtagtaatgaagagaagtgagttcatcctcgtcggcgcaattagggtcggatcctttgtacagaacgtaatagtttaagctcccattgaatttatatctaagataacacagcaatagatcggatgatttactaaagtcatcaatggtgtccgttagtatatcaaagatcttgttatcgattgatagtggtcatccttgctatcaaagttacgcatgccgtggtgtaacaatatctttaatacagatggattaaatcgtgtattcatcgtatagcaatgtaatggagagttacctcgtttattcagatcgcagtgtttaataactagcttaaacagatgagacgatgtatccacatcaaagaacgtaaaatacatatgacagacattgttgacagaaacgtgaccttcattcttaccgtcgtccataaatacgttaggtatgtaccacatactgtcgcgaacgatgcgtacaatctcgtccatctcataatgatttactttttcataattaaagatgtgaaagaaaaccgaacaatatatttttttagtaatgtttatgcgagacatataaaataaactccgtgtttatgatgccggtaaatgtttttatcatcttggacggaatcgattttgtaatatgtcatggaaacaaatgaaacaggacattatcgctccatgataaattatttaatggagtaataaagtatctccatgggtaatttcgaaatcaagttatcgtctgtattaatgttgtccactatggagtcgatcctctcattgttctttacagtttctgtaatgatggacgttagttcttttttgtaccatttgatgtcggattctttgcgtatctcaatctgtggcgtttgcttcgtttaaataatatatcaaacatggagacgcctgatatgtaggcattcttcattctattaatgtctactctatagcgctttagttccttatgacgaccggcgatatcatactttactttagaaggaaaatcatcatctaggattaaggcgtatctgatacatgccgataatggttcaggatatagatagcgtatatctctattaaatgcgtcaatcatagtctctagagtgggatggtaactcagtaataaatcaactatcctcgttttgttttctctttggtaactgcttttctggatggccgtattgattatcgagcgtgatgttgtgacactcgctccatattccaataaccgctttgcaaattgtatattattgacatcgaccgcgtaatatagtagagttatcgatcatatctatatcatccatgtacttgcttagtatatcaaatacatctatcagtatggtttcataacagtgatacccgcaattattaaatctcgataatatcagaccgtacatacatagacggccattgttcgatatgtgatttacagccgcgtgtccatattttccacgataaaccttacgacgtttacatcgacgagattattattaacaaagtagtcgtgtagaggatagttgttgtccgtcgtcttatccatggttgctccgttatctaacatgcattgaatgataggtatacttaccatatcgccgtaatgtaagtagtttatcaacatggcttgtacatcctgttgtctaaatctctttagaatgttatcgatgatgtagtggttatattctctggaatcgtacgaagtaatactacgcattacgtcgacaagagtatgacgtctctcaataagaagattaacgatttccatgtctacattatatggggttactctaaatcgcttgtttagataatacgcctctaatatagggctgacgtcgtatactctacacgtgtccacatcctttattaataataatttaacaatctctatatctatggttgagaaagaccagtagtattggatgggtaaagatcctccttcgtctctgccatggatggaaacattgttatcgatcaaacatttaattacatccttggatagagattgagattctctatgagacgatatatagtaatgaagagagttcttacacatatcactgtcgtacatacaggtacgaaatacgtaaccggtgctgtaacattctgatttaagaagccatagcaatacttctggtctcggattaggcgtcgttacgtatatatccaccaatccgagaccattgattgcataattcgtattcttggacggacgtatccgtttatccacaattaggtattttagcagacgtaagtcgatattatccgaatacagatcgaaatcatttatattcgacttgagttcgttagaggaatttgaatagctggatatcagtagatgcacaatctgagattttacgtatctatgcttactgtatactcctagcggagttaatccttcgttgtttctacaaagtctctcgactccgcgagagaacaatcttaatgtctgtatcgcatttattggagacgtaacaatgtagcgcattgtttcctcgtctatctatatgttttgataagttgtgacacgtttcaatttctagttttatttttttgtacgtcacatcttcatccagtagacgacatagaatagtgcactctaccacaataatccatagctattctggtgctaattattcctatttcacgaaggcaatcattcctcataagatgataaaaagtgtagtggagatttagtatttagcagtgcggatatgatccaagagggtgagatagtcgttctcgttcagaatctttcgcagcataagtagtatgtcgatatacttatcgttgaagactctttataaaagtctatttgtttatatttattgcggatagcagtatttccctataaaaagtatacgtcctgtggtgtctttaatcatgtacatgaatggatggtttatgtagaccttcgtacgatataccatcgaaaagttaatcgtaaatactcctgtaacggccgatgcttctgtatactcctcattaacatctataaacgtcgtatgtagaaatttttctacagtgatagtttcattacacatcttgctaaaatctgcataatatccgaatatattagtaagtcctaaattttctaaaatcggtaccagattatacggttctgtcatttccactttaaactttggcatatacaagtctatacttttagtagataacataccacaccattttttaaatttttcatctgttatatttttttctatgttatatataccttctatgtcgtccggtagtataattaccatactagagtttccctcgtatggaatatcgataatagagaatcctccgaataattcattaatatgtacatattgcaagttattctcggtacccaccatcatatcaacgctggtaactatattcttagaaatataaaacttgtctgtatatgtaagatgtttagaaaatggatatttccacattgctttaaaatggacggcgctaacaactgtcatacgagtattaatggatagcggactagtcaataaggaattaattttaccatttgtcattgtcttaacccattcgttgattagttcctttgtttggttagcattattaaagtttacagtttgaaaatcgtcttttattttttgtaggaaggaggcgtggaactcgatactatcgctaccgtatattttatttgcggtagctagtgtcgcacaatacggaatatctacctccatgtcatcattattgtcatcgggtgtattctcattcatattctctatatattttgatagttgttcagctgtagaaccagctgctccatgatttagaatagataaagtagataaaatggaaactggagaaatcaaaacattttcatcagggtgttttaagattagttctttaaagatatccatggtatagacctaacgataacgatatatatcataaataaataatgttaaatttcaatttatgtttgtaccccgtattcatacttaacaaattggtattgcgtacacaatcaatcatattacataccattaataatgcaagcataaaaaattgttagtagatgtttctaaatataggttccgtaagcaaagaatataagaatgaagcggtaatgataaaatcaatcgttatctaaaatgatcatactcatttattttattctattatattaacacatacatttttaacagcaacacattcaatattgtattgttatttttatattatttacacaattaacaatatattattagtttatattactgaattaataatataaaattcccaatcttgtcataaacacacactgagaaacagcataaacacagaatccatcaaaaatgttgataaattatctgatgttgttgttcgctgctatgataatcagatcattcgccgatagtggtaacgctatcgaaacgacattgccagaaattacaaacgctacaacagatattccagctatcagattatgcggtccagagggagatggatattgtttacacggtgactgtatccacgctagagatattgacggtatgtattgtagatgctctcatggttatacaggcattagatgtcagcatgtagtattagtagactatcaacgttcagaaaacccaaacactacaacgtcatatatcccatctcccggtattatgcttgtattagtaggcattattatgtgttgtctattatctgtttataggttcactcgacgaactaaactacctatacaagatatggttgtgccataatttttataaatttttttatgagtatttttacaaaaatgtataaagtgtatgtcttatgtatatttataaaaatgctaagtatgcgatgtatctatgttatttgtatttatctaaacaatacctctacctctagatattatacaaaaattttttatttcggcatattaaagtaaaatctagttaccttgaaaatgaatacagtgggtggttccgtatcaccagtaagaacataatagtcaaatacagtatccgattgagattttgcatacaatactagtctagaaagaaatttgtaatcatcttctgtgacgggagtccatatatctgtatcatcgtctagtttatcagtgtcccatgctatattcctgttatcatcattagttaatgaaaataactctcgtgcttcagaaaagtcaaatattgtatccatacatacatctccaaaactatcgcttatacgtttatctttaacgatacctatacctagatggttatttactaacagacattttccagatctattgactataactcctatagtttccacatcaaccaagtaatgatcatctattgttatataacaataacataactcttttccatttttatcagtatgtatatctatatcaacgtcgtcgttgtagtgaatagtagtcattgatctattatatgaaacggatatgtctagaacggcaattgttttacgtccagttaacactttcgttgatttaaagtctagagtctttgcaaacataatatccttatccgactttatatttcctgtagggtggtataattttattttgcctccacatatcggtgtttccaaatatattactagacaatattccatatagttattagttaagggtacccaattagaacacgtacgcttattatcatcatttggatcgtatttcataaaagttattgtgttatcgatgtcaacacattctacattttttaatcgtctatatagtatttttctgatattttctataatatcagaattgtcttccatcggaagttgtatactatcggaatcagttacatgtttaaataattctctgatgtcattccttatacaatcaaattcattattaaacagtttaatagtctgtagacctttatcgtcgtaaatatccattgtcttattagttacgcttatttttatgtgtttttacgttgctttattatattttataagaatgattgtttgacgaatcacgagaactattaagacacattattaggtatatattataaaaaagtttttgattacgatgttataagaggaaagaggacacattaacatcatacatcaattaactacattcttataacatcgtaatcaaaagaattgcaattttgatgtataacaactgtcaatgggttatggaattgtatattacatattatacggtatgttggtaacgacaaataccggtcggtaattgtctgccggtgtaatagaattatatatatctatctattacaccggccttgtatacataataataagttgtggtagtatgatctccatatttataatttaggactttgtattcagtatttttggaatcataaaaaataaaaaaaagttttactaatttaaaatttaaaaagtatttacatttttttcactgtttagtcgcggatatggaattcgatcctgccaaaatcaatacatcatctatagatcatgtaacaatattacaatacatagatgaaccaaatgatataagactaacagtatgcattatccgaaatattatatcaatatcacaaaaataaatacacatttggctaatcaatttcgggcttggaaaaaacgtatcgccggaagggactatatgactaacttatctagagatacaggaatacaacaatcaaaacttactgaaactatacgtaactgtcaaaaaaatagaaacatatatggtctatatatacactacaatttagttattaattggataaccgatgtgattatcaatcaatattaagagggttggtaaattggtacatagctaataatacctatacacccaataatacaacaaccatttctgagttggatatcatcaaaatactaaataaatacgaggacgtgtatagagtaagtaaagaaaaagaatgtggaatttgctatgaagttgtttactcaaaacgatagatactttggtttattggattcgtgtactcatatattttgcataacatgcatcaatatatggcatagaacacgaagagaaaccggtgcgtcggataattgtcctatatgccgtacccgttttagaaacataacaatgagcaagttctataagctagttaactaataaataaaaagtttaatttgttgacgacgtatgtcgttattttttctcgtataaaagattaatttgattctaatataatctttagtattggataaatatcaattcaaattaattccattagattatatcataaataaaaatagtagcacacaactacttcagccaaatattcttttttgaaacgccatctatcgtagtgaggacacaagtgaacctataattatcaaatttattagtatcggttacatgaaggactttacgtagagtgacgattccactatctgtggtacgaacggtttcatcttctttgatgccatcacccagatgttctataaacttggtatcctcgtccgatctcatatcctttgccaaccaatacatgtagctaaaattaggcataaatttcacacatcctgaacaatgaaattctccagaagatgttacaatgtctagatttggacatttggtttcaaccgcgttaacatatgagtgaacacacccatacatgaaagcgatgagaaataggattctcatcttgccaaaatatcactagaaaaaatttatttatcagttttaaaggtataaaaaatacttattgttgctcgaatattttgtatttgatggtatacggaagattagaaatgtaggtattatcatcaactgattctatggttttatgtattctatcatgtttcactattgcgttggaaataatatcatatgcttccacatatattttattttgttttaactcataatactcacgtaattctggattattggcatatctatgaataattttagctccatgatcagtaaatattaatgagaacatagtattaccacctaccattatttttttcatctcattcaattcttaattgcaaagatctatataatcattatagcgttgacttatggactctggaatcttagacgatgtacagtcatctataatcatggcatatttaatacattgttttatagcatagtcgttatctacgatgttagatatttctctcaatgaatcaatcacacaatctaatgtaggtttatgacataatagcattttcagcagttcaatgtttttagattcgttgatggcaatggctatacatgtatatccgttatttgatctaatgttgacatctgaaccggattctagcagtaaagatactagagattgtttattatatctaacagccttgtgaagaagtgtttctcctcgtttgtcaatcatgttaatgtctttaagataaggtaggcaaatgtttatagtactaagaattgggcaagcataagacatgtcacaaagacccttttttgtatgtataagtgtaaaaattataacatccatagttggatttacataggtgtccaatcgggatctctccatcatcgagataattgatggcatctcccttccttttttagtagatatttcatcgtgtaagaatcaatattaatatttctaaagtatccgtgtatagcctctttatttaccacagctccatattccactagagggatatcgccgaatgtcatatactcaattagtatatgttggaggacatccgagttcattgttttcaatatcaaagagatggtttccttatcatttctccatagtggtacaatactacacattattccgtgcggctttccattttccaaaaacaatttgaccaaatctaaatctacatctttattgtatctataatcactatttagataatcagccataattcctcgagtgcaacatgttagatcgtctatatatgaataagcagtgttatctattcctttcattaacaatttaacgatgtctatatctatatgagatgacttaatataatattgaagagctgtacaatagtttttatctataaaagacggcttgattccgtgattaattagacatttaacaacttccggacgcacatatgctctcgtatccgactctgaatacagatgagagatgatatacagatgcaatacggtaccgcaatttcgtagttgataatcatcatacgcgtatcagtactcgtcctcataaagaacactgcagccattttctatgaacaaatcaataattttagaaacaggatcattgtcattacataattttctataactgaacgatggttttcacatttaacactcaagtcaaatccatgttctaccaacacctttatcaagtcaacgtctacatttttggatttcatatagctgaatatattaaagttatttatgttgctaaatccagtggcttctagtagagccatcgctatatccttattaactttaacatgtctactatttgtgtattcttctaatggggtaagctgtctccaatttttgcgtaatggattagtgccactgtctagtagtagtttgacgacctcgacattattacaatgctcattaaaaaggtatgcgtgtaaagcattattcttgaattggttcctggtatcattaggatctctgtctttcaacatctgtttaagttcatcaagagccacctcctcattttccaaatagtcaaacattttgactgaatgagctactgtgaactctatacacccacacaactaatgtcattaaatatcatgtcaaaaacttgtacaattattaataaaaataatttagtgtttaaattttaccagttccagattttacacctccgttaatacctccattaaccccactggacgatcctcctccccacattccaccgccaccagatgtataagttttagatcctttattactaccatcatgtccatggataaagacactccacatgccgccactaccccctttagaagacatattaataagacttaaggacaagtttaacaataaaattaatcacgagtaccctactaccaacctacactattatatgattatagtttctatttttacagtaccttgactaaagtttctagtcacaagagcaatactaccaacctacactattatatgattatagtttctatttttataggaacgcgtacgagaaaatcaaatgtctaatttctaacggtagtgttgataaacgattgttatccgcggatacctcctctatcatgtcgtctattttcttactttgttctattaacttattagcattatatattatttgattataaaacttatattgcttattagcccaatctgtaaatatcggattattaacatatcgtttctttgtaggtttatttaacatgtacatcactgtaagcatgtccttaccatttattttaatttgacgcatatccgcaatttctttttcgcagtcggttataaattctatatatgatggatacatgctacatgtgtacttataatcgactaatatgaagtacttgatacatattttcagtaacgatttattattaccacctatgaataagtacctgtgatcgtctaggtaatcaactgttttcttaatacattcgatggttggtaatttactcagaataatttccaatatcttaatatataattctgctatttctgggatatatttatctgccagtataacacaaatagtaatacatgtaaacccatattttgttattatattaatgtctgcgccattatctattaaccattctactaggctgacactatgcgactcaatacaatgataaagtatactacatccatgtttatctattttgtttatatcatcaatatacggcttacaaagttttagtatcgataacacatccaactcacgcatagagaaggtagggaataatggcataatatttattaggttatcatcattgtcattatctacaactaagtttccattttttaaaatatactcgacaactttaggatctctattgccaaatttttgaaaatatttatttatatgcttaaatctatataatgtagctccttcatcaatcatacatttaataacattgatgtatactgtatgataagatacatattctaacaatagatcttgtatagaatctgtatatcttttaagaattgtggatattaggatattattacataaactattacacaattctaaaatataaaacgtatcacggtcgaataatagttgatcaactatataattatcgattttgtgatttttcttcctaaactgtttacgtaaatagttagatagaatattcattagttcatgaccactatagttactatcgaataacgcgtcaaatatttcccgtttaatatcgcatttgtcaagataataatagagtgtggtatgttcacgataagtataataacgcatctctttttcgtgtgaaattaaatagtttattacgtccaaagatgtagcataaccatcttgtgacctagtaataatataataatagagaactgttttacccattctatcatcataatcagtggtgtagtcgtaatcgtaatcgtctaattcatcatcccaattataatattcaccagcacgtctaatctgttctattttgatcttgtatccatactgtatgttgctacatgtaggtattcctttatccaataatagtttaaacacatctacattgggatttgatgttgtagcgtatttttctacaatattaataccatttttgatactatttatttctatacctttcgaaattagtaatttcaataagtctatattgatgttatcagaacatagatattcgaatatatcaaaatcattgatatttttatagtcgactgacgacaataacaaaatcacaacatcgtttttgatattattatttttcttggtaacgtatgcctttaatggagtttcaccatcatactcatataatggatttgcaccactttctatcaatgattgtgcactgctggcatcgatgttaaatgttttacaactatcatagagtatcttatcgttaaccatgattggttgttgatgctatcgcattttttggtttctttcatttcagttatgtatggatttagcacgtttgggaagcatgagctcatatgatttcagtactgtagtgtcagtactattagtttcaataagatcaatctctagatctatagaatcaaaacacgataggtcagaagataatgaatatctgtaggcttcttgttgtactgtaacttctggttttgttagatggttgcatcgtgctttaacgtcaatggtacaaattttatcctcgctttgtgtatcatattcgtccctactataaaattgtatattcagattatcatgcgatgtgtatacgctaacggtatcaataaacggagcacaccatttagtcataaccgtaatccaaaaatttttaaagtatatcttaacgaaagaagttgtgtcattgtctacggtgtatggtactagatcctcataagtgtatatatctagagtaatgtttaatttattaaatggttgataatatggatcctcgtgacaatttccgaagatggaaataagacataaacacgcaataaatctaattgcggacatggttactccttaaaaaaatacgaataatcaccttggctatttagtaagtgtcatttaacactatactcatattaatccatggactcataatctctatacgggattaacggatgttctatatacggggatgagtagttctcttctttaactttatactttttactaatcatatttagactgatgtatgggtaatagtgtttgaagagctcgttctcatcatcagaataaatcaatatctctgtttttttgttatacagatgtattacagcctcatatattacgtaatagaacgtgtcatctaccttattaactttcaccgcatagttgtttgcaaatacggttaatcctttgacctcgtcgatttccgaccaatctgggcgtataatgaatctaaactttaattgcttgtaatcattcgaaataatttttagtttgcatccgtagttatcccctttatgtaactgtaaatttctcaacgcgatatctccattaataatgatgtcgaattcgtgctgtatacccatactgaatggatgaacgaataccgacggcgttaatagtaatttactttttcatctttacatattgggtactagttttactatcataagtttataaattccacaagctactatggaataagccaaccatcttagtataccacacatgtcttaaagtttattaattaattacatgttgttttatatatatcgctacgaatttaaagagaaattagtttaggaagaaaaattatctatctacatcatcacgtctctgtattctacgatagagtgctactttaagatgcgacagatccgtgtcatcaaatatatactccattaaaatgattattccggcagcgaacttgatattggatatatcacaacctttgttaatatctacgacaatagacagcagtcccatggttccataaacagtgagtttatctttctttgaagagatattttgtagagatcttataaaactgtcgaatgacatcgcatttatatctttagctaaatcgtatatgttaccatcgtaatatctaaccgcgtctatcttaaacgtttccatcgctttaaagacgtttccgatagatggtctcatttcatcagtcatactgagccaacaaatataatcgtgtataacatctttgatagaatcagactctaaagaaaacgaatcggctttattatacgcattcatgataaacttaatgaaaaatgtttttcgttgtttaagttggatgaatagtatgtcttaataattgttattatttcattaattaatatttagtaacgagtacactctataaaaacgagaatgacataactaatcataactagttatcaaagtgtctaggacgcgtaattttcatatggtatagatcctgtaagcattgtctgtattctggagctattttctctatcgcattagtgagttcagaatatgttataaatttaaatcgaataacgaacataactttagtaaagtcgtctatattaactcttttattttctagccatcgtaataccatgtttaagatagtatattctctagttactacgatctcatcgttgtctagaatatcacatactgaatctacatccaattttagaaattggtctgtgttacatatctcttctatattattgttgatgtattgtcgtagaaaactattacgtagaccattttctttataaaacgaatatatagtactccaattatctttaccgatatatttgcacacataatccattctctcaatcactacatctttaagattttcgttgttaagatatttggctaaactatataattctattagatcatcaacagaatcagtatatatttttctagatccaaagacgaactctttggcgtcctctataatattcccagaaaagatattttcgtgttttagtttatcgagatctgatctgttcatatacgccatgattgtacggtacgttatgataaccgcataaaataaaaatccattttcatttttaaccaatactattcataattgagattgatgtaatactttgttactttgaacgtaaagacagtacacggatccgtatctccaacaagcacgtagtaatcaaatttggtgttgttaaacttcgcaatattcatcaatttagatagaaacttatactcatcatctgttttaggaatccatgtattattaccactttccaacttatcattatcccaggctatgtttcgtccatcatcgttgcgcagagtgaataattcttttgtattcggtagttcaaatatatgatccatgcatagatcggcaaagctattgtagatgtgatttttcctaaatctaatataaaactcgtttactagcaaacactttcctgatttatcgaccaagacacatatggtttctaaatctatcaagtggtggggatccatagttatgacgcagtaacatatattattacattcttgactgtcgctaatatctaaatatttattgttatcgtattggattctgcatatagatggcttgtatgtcaaagatatagaacacataaccaatttatagtcgcgctttacattctcgaatctaaagttaagagatttagaaaacattatatcctcggatgatgttatcactgtttctggagtaggatatattaaagtctttacagatttcgtccgattcaaataaatcactaaataatatcccacattatcatctgttagagtagtatcattaaatctattatattttatgaaagatatatcactgctcacctctatatttcgtacatttttaaactgtttgtataatatctctctgatacaatcagatatatctattgtgtcggtagacgataccgttacatttgaattaatggtgttccattttacaacgtttaacaagttgaccaattcatttttaatagtatcaaactctccatgattaaatattttaatagtatccattttatatcactacggacacaaagtagctgacataaaccattgtataatttttatgttttatgtttattagcgtacacattttggaagttccggcttccatgtatttcctggagagcaagtagatgatgaggaaccagataggttatatccgtacttgcacttaaagtttacattgtcgttgtatgagtatgatcttttaaacccgctagacaagtatccgtttgatattgtaggatgtggacatttaacaatctgacacgtgggtggatcggaccattctcctcctgaacacaggacactagagttaccaatcaacgaatatccactattgcaactataagttacaacgctcccatcggtataaaaatcctcgtatccgttatgtcttccgttggatatagatggaggggattggcatttaacagattcacaaataggtgcctcgggattccataccatagatccagtagatcctaattcacaatacgatttagattcaccgatcaactgatatccgctattacaagagtacgttatactagagccaaagtctactccaccaatatcaagttggccattatcgatatctcgaggcgatgggcatctccgtttaatacattgattaaagagtgtccatccagtacctgtacatttagcatatataggtcccattttttgctttctgtatccaggtagacatagatattctatagtgtctcctatgttgtaattagcattagcatcagtctccacactattcttaaatttcatattaatgggtcgtgacggaatagtacagcatgatagaacgcatcctattcccaacaatgtcaggaacgtcacgctctccaccttcatatttatttatccgtaaaaatgttatcctggacatcgtacaaataataaaaagcccatatatgttcgctattgtagaaattgtttttcacagttgctcaaaaacgatggcagtgacttatgagttacgttacactttggagtctcatctttagtaaacatatcataatattcgatattacgagttgacatatcgaacaaattccaagtatttgattttggataatattcgtattttgcatctgctataattaagatataatcaccgcaagaacacacgaacatctttcctacatggttaaagtacatgtacaattctatccatttgtcttccttaactatatatttgtatagataattacgagtctcgtgagtaattccagtaattacatagatgtcgccgtcgtactctacagcataaactatactatgatgtctaggcatgggagacttttttatccaacgatttttagtgaaacattccacatcgtttaatactacatatttctcatacgtggtataaactccacccattacatatatatcatcgtttacgaataccgacgcgcctgaatatctaggagtaattaagtttggaagtcttatccatttcgaagtgccgtgtttcaaatattctgccacacccgttgaaatagaaaattctaatcctcctattacatataactttccatcgttaacacaagtactaacttctgattttaacgacgacatattagtaaccgttttccattttttcgttttaagatctacccgcgatacggaataaacatgtctattgttaatcatgccgccaataatgtatagacaattatgtaaaacatttgcattatagaattgtctatctgtattaccgactatcgtccaatattctgttctaggagagtaatgggttattgtggatatataatcagagtttttaatgactactatattatgttttataccatttcgtgtcactggctttgtagatttggatatagttaatcccaacaatgatatagcattgcgcatagtattagtcataaacttgggatgtaaaatgttgatgatatctacatcgtttggatttttatgtatccactttaataatatcatagctgtaacatcctcatgatttacgttaacgtcttcgtgggataagatagttgtcagttcatcctttgataattttccaaattctggatcggatgtcaccgcagtaatattgttgattatttctgacatcgacgcattatatagttttttaattccatatcttttagaaaagttaaacatccttatacaatttgtgaaattaatattatgaatcatagtttttacacatagatctactacaggcggaacatcaattattatggcagcaactagtatcatttctacattgtttatggtgatgtttatcttcttccagcgcatatagtctaatagcgattcaaacgcgtgatagtttataccattcaatataatcgcttcatcctttagatggtgatcctgaatgcgtttaaaaaaattatacggagacgccgtaataatttccttattcacttgtataatttccccattgatagaaaatattacgctttccattcttaaagtactataagtaattatagtataatgtaaacgtttatatattcaatatttttataaaaatcattttgacattaattcctttttaaatttccgtctatcatctatagaaacgtattctatgaatttataaaatgcttttacgtgtcctatcgtaggcgatagaaccgctaaaaagcctatcgaatttctacaaaagaatctgttatatggtatagggagagtataaaacattaaatgtccgtacttattaaagtattcagtagccaatcctaactctttcgaatacttattaatggctcttgttctgtacgaatctatttttttgaacaacggacctagtggtatatcttgttctatgtatctaaaataatgtctgactagatccgttagtttaatatccgcagtcatcttgtctagaatggcaaatctaactgcgggtttaggctttagtttagtttctatatctacatctatgtctttatctaacaccaaaaatataatagctaatattttattacaatcatccggatattcttctacgatctcactaactaatgtttctttggttatactagtatagtcactatcggacaaataaagaaaatcagatgatcgatgaataatacatttaaattcatcatctgtaagatttttgagatgtctcattagaatattattagggttagtactcattatcattcggcagctattacttattttattatttttcaccatatagatcaatcattagatcatcaaaatatgtttcaatcatcctaaagagtatggtaaatgactcttcccatctaatttctgaacgttcaccaatgtctctagccactttggcactaatagcgatcattcgcttagcgtcttctatattattaactggttgattcaatctatctagcaatggaccgtcggacagcgtcattctcatgttcttaatcaatgtacatacatcgccgtcatctaccaattcatccaacaacataagctttttaaaatcatcattataataggtttgatcgttgtcatttctccaaagaatatatctaataagtagagtcctcatgcttagttaacaactattttttatgttaaatcaattagtacaccgctatgtttaatacttattcatattttagtttttaggattgagaatcaatacaaaaattaatgcatcattaattttagaaatacttagtttccacgtagtcaatgaaacatttgaactcatcgtacaggacgttctcgtacaggacgtaactataaaccggtttatatttgttcaagatagatacaaatccgataactttttttacgaattctacgggatccactttaaaagtgtcataccgggttctttttatttttttaaacagatcaatggtgtgatgttgattaggtcttttacgaatttgatatagaatagcgtttacatatcctccataatggtcaatcgccatttgttcgtatgtcataaattctttaattatatgacactgtgtattatttagttcatccttgttcattgttaggaatctatccaaaatggcaattatactagaactataggtgcgttgtatacacatattgatgtgtctgtttatacaatcaatgctactaccttcgggtaaaattgtagcatcatataccatttctagtactttaggttcattattatccattgcagaggacgtcatgatcgaatcataaaaaaatatattatttttatgttattttgttaaaaataatcatcgaatacttcgtaagatactccttcatgaacataatcagttacaaaacgtttatatgaagtaaagtatctacgatttttacaaaagtccggatgcataagtacaaagtacgcgataaacggaataataatagatttatctagtctatctttttctatagctttcatagttagatacatggtctcagaagtaggattatgtaacatcagcttcgataaaatgactgggttatttagtcttacacattcgctcatacatgtatgaccgttaactacagagtctacactaaaatgattgaacaatagatagtctaccattgtttcgtattcagatagtacagcgtagtacatggcatcttcacaaattatatcattgtctaatagatatttgacgcatcttatggatcccacttcaacagccatcttaaaatcggtagaatcatattgctttcctttatcattaataatttctagaacatcatctctatcataaaagatacaaatattaactgtttgatccgtaataacattgctagtcgatagcaatttgttaataagatgcgctgggctcaatgtcttaataagaagtgtaagaggactatctccgaatttgttttgtttattaacatccgttgatggaagtaaaagatctataatgtctacattcttgactgttttagagcatacaatatggagaggtgtatttccatcatgatctggttttgagggactaattcctagtttcatcatccatgagattgtagaagcttttggattgtctgacataagatgtctatgaatatgatttttgccaaatttatccactatcctggcttcgaatccgatggacattatttttttaaacactctttctgaaggatctgtacacgccaacaacggaccacatccttcttcatcaaccgagttgttaatcttggctccatactgtaccaataaatttattctctctatgacttcatcatctgttcccgagagataatatagaggcgttttatgctgtttatcacacgcgtttggatctgcgccgtgcgtcagcagcatcgcgactattctattattattaattttagaagctatatgcaatggataatttccatcatcatccgtctcatttggagagtatcctctatgaagaagttcttcgacaaatcgttcatctagtcctttaattccacaatacgcatgtagaatgtgataattatttccagaaggttcgatagcttgtagcatattcctaaatacatctaaatttttactattatatttggcataaagagatagataatactcggccgacataatgttgtccattgtagtataaaaattaatatttctatttctgtatatttgcaacaatttactctctataacaaatatcataacttagttcttttatgtcaagaaggcactggtttagttcatctataaatgtcacgccataactaccacgcatgccatactcagaattatgataaagatatttatccttggggtgtaggtaatggggattaatctttgttggatcagtctctaagttaacacatgtcacacatgatccatttatagttatatcacacgatgatgatttatgaattgattccggaagatcgctatcgtattttgtggttccacaattcatttccatacatgttattgtcacactaatattatgatgaactttatctagccgctgagtggtaaacaacagaacagatagtttattatctttaccaacaccctcagccgctgccacaaatctctgatccgtatccatgatggtcatgtttatttctagtccgtatccagtcaacactatgttagcatttctgtcgatatagctttcactcatatgacactcaccaataatagtagaattaatgtcgtaatttacaccaatagtgagttcggcggcaaagtaccaataccggtaatcttgtcgaggaggacatatagtattcttgtattctaccgaatacccgagagatgcgatacaaaagagcaagactaatttgtaaaccatcttactcaaaatatgtaacaatagtacgatgcaatgagtaagacaataggaaatctatcttatatacacataattattctatcaattttaccaattagttagtgtaatgttaacaaaaatgtgggagaatctaattagtttttctttacacaattgacgtacatgagtctgagttccttgtttttgctaattatttcatccaatttattattcttgacgatatcgagatcttttgtataggagtcaaacttgtattcaacatgcttttctataatcattttagctatttcggcatcatccaatagtacattttccagattagcagaatagatattaatgtcgtatttgaacagagcctgtaacatctcaatgtctttattatctatagccaatttaatgtccggaatgaagagaagggaattattggtgtttgtcgacgtcatatagtcgagcaagagaatcatcatatccacgtgtccattttttatagtgatgtgaatacaactaaggagaatagccagatcaaaagtagatggtatctctgaaagaaagtaggaaacaatacttacatcattaagcatgacggcatgataaaatgaagttttccatccagttttcccatagaacatcagtctccaatttttcttaacaaacagttttaccgtttgcatgttaccactatcaaccgcataatacaatgcggtgtttcccttgtcatcaaattgtgaatcatccagtccactgaatagcaaaatctttactattttggtatcttccaatgtggctgcctgatgtaatggaaattcattctctagaagatttttcaatgctccagcgttcaacaacgtacatactagacgcacgttattatcagctattgcataatacaaggcactatgtccatggacatccgccttaaatgtatctttactagagagaaagcttttcagctgcttagacttccaagtattaattcgtgacagatccatgtctgaaacgagacgctaattagtgtatattttttcattttttataattttgtcatattgcaccagaattaataatatctctaatagatctgattagtagatacatggctatcgcaaaacaacatatacacatttaataaaaataatatttattaagaaaattcagatttcacgtacccatcaatataaataaaataatgattccttacaccgtacccatattaaggagattccaccttacccataaacaatataaatccagtaatatcatgtctgatgatgaacacaaatggtgtattaaattccagtttttcaggagatgatctcgccgtagctaccataatagtagatgcctctgctacagttccttgttcgtcgacatctatctttgcattctgaaacattttataaatatataatgggtccctagtcatatgtttaaacgacgcattatctggattaaacatactaggagccatcatttcggctatcgacttaatatccctcttattttcgatagaaaatttagggagtttaagattgtacactttattccctaattgagacgaccaatagtctaattttgcagccgtgatagaatctgtgaaatgggtcatattatcacctattgccaggtacatactaatattagcatccttatacggaaggcgtaccatgtcatattctttgtcatcgattgtgattgtatttccttgcaatttagtaactacgttcatcatgggaaccgttttcgtaccgtacttattagtaaaactagcattgcgtgttttagtgatatcaaacggatattgccatatacctttaaaatatatagtattaatgattgcccatagagtattattgtcgagcatattagaatctactacattagacataccggatctacgttctactatagaattaattttattaaccgcatctcgtctaaagtttaatctatataggccgaatctatgatattgttgataatacgacggtttaatacacacagtattatctacgaaactttgataagttagatcagtgtacgtatatttagatgttttcagcttagctaatcctgatattaattctgtaaatgctggacccagatctctttttctcaaatccatagtcttcaataattctattctagtattacctgatgcaggcaatagcgacataaacatagaaaacgaatagccaaacggcgagaagacaatattatcatcttgaatatttttatacgctactataccggcattggtaaatccttgtagacgataggcggacgctgaacacgctaacgatagtatcaataacgcaatcatgattttatggtattaataattaaccttatttttatgttcggtataaaaattattgatgtctacacatccttttgtaattgacatctatatatccttttgtataatcaactctaatcactttaacttttacagttttccctaccagtttatccctatattcaacatatctatccatatgcatcttaacactctctgccaagatagcttcagagtgaggatagtcaaaaagataaatatatagagcataatcattctcgtatactctgccctttattacatcacccgcattgggcaacgaataacaaaatgcaagcatcttgttaacgggctcgtaaattgggataaaaattatgtttttattgattttatatctattttattcaagagaatattcaggaatttctttttccggttgtatctcgtcgcagtatatatcatttgtacattgtttcatattttttaatagtttacaccttttagtaggactagtatcgtacaattcatagctgtattttgaattccaatcacgcataaaaatatcttccaattgttgacgaagacctaatccatcatccggtgtaatattaatagatgctccacatgtatccgtaaagtaatttcctgtccaatttgaggtacctatataggccgttttatcggttaccatatatttggcatggtttaccctagaatacggaatgggaggatcagcatctggtacaataaatagctttacttctatatttatgtttttagattttagcatagcgatagatcttaaaaagtttctcatgataaacgaagatcgttgccagcaactaatcaatagcttaacggatacttgtctgtctatagcggatcttcttaattcatcttctatataaggccaaaacaaaattttacccgccttcgaataaataatagggataaagttcataacagatacataaacgaatttactcgcatttctaatacatgacaataaagcggttaaatcattggttctttccatagtacatagttgttgcggtgcagaagcaataaatacagagtgtggaacgccgcttacgttaatactaagaggatgatctgtattataatacgacggataaaagtttttccaattatatggtagattgttaactccaagataccagtatacctcaaaaatttgagtgagatccgctgccaagttcctattattgaagatcgcaatacccaattccttgacctgagttagtgatctccaatccatgttagcgcttcctaaataaatatgtgtattatcagatatccaaaattttgtatgaagaactcctcctaggatatttgtaatatctatgtatcgtacttcaactccggccatttgtagtctttcaacatcctttaatggtttgttagatttattaacggctactctaactcgtactcctcttttgggtaattgtacaatctcgtttaatattatcgtgccgaaattcgtacccacttcatccgataaactccaataaaaagatgatatatctagtgtttttgtggtattggatagaatttccctccacatgttaaatgtagacaaatatactttatcaaattgcatacctataggaatagtttctgtaatcactgcgattgtattatccggattcattttatttgttaaaagaataatcctatatcacttcactctattaaaaatccaagtttctatttctttcatgactgattttttaacttcatccgtttccttatgaagatgatgtttggcaccttcataaatttttatttctctattacaatttgcatgttgcatgaaataatatgcacctaaaacatcgctaatcttattgtttgttccctggagtatgagagtcgggggggtgttaatcttggaaattatttttctaaccttgttggtagccttcaagacctgactagcaaatccagccttaattttttcatgattgactaatgggtcgtattggtatttataaactttatccatatctctagatactgattctggacatagctttccgactggcgcatttggtgtgatggttcccataagtttggcagctagcagattcagtcttgaaacagcatctgcattaactagaggagacattagaatcattgctgtaaacaagtttggattatcgtaagaggctagctcccatggaatgacccaataagtagatttaatagttaccacgtgctgtaccaaagtcatcaatcatcattttttcaccattacttcttccatgtccaatatgatcatgtgagaatactaaaattcctaacgatgatatgttttcagctagttcgtcataacgtccagaatgtttaccagctccatgacttatgaatactaatgccttaggatatgtaataggtttccaatatttacaatatatgtaatcattgtccagattgaacatacagtttgcactcatgattcacgttatataactatcaatattaacagttcgtttgatgatcatattatttttatgttttattgataattgtaaaaacatacaattaaatcaatatagaggaaggagacggctactgtcttttgtgagatagtcatggcgactaaattagattatgaggatgctgttttttactttgtggatgatgataaaatatgtagtcgcgactccatcatcgatctaatagatgaatatattacgtggagaaatcatgttatagtgtttaacaaagatattaccagttgtggaagactgtacaaggaattgatgaagttcgatgatgtcgctatacggtactatggtattgataaaattaatgagattgtcgaagctatgagcgaaggagaccactacatcaattttacaaaagtccatgatcaggaaagtttattcgctaccataggaatatgtgctaaaatcactgaacattggggatacaaaaagatttcagaatctagattccaatcattgggaaacattacagatttgatgaccgacgataatataaacatcttgatactttttctagaaaaaaaattgaattgatgatataggggtcttcataacgcataattattacgttagcattctatatccgtgttaaaaaaaattatcctatcatgtatttgagagttttatatgtagcaaacatgatagctgtgatgccaataagctttagatattcacgcgtgctagtgttagggatggtattatctggtggtgaaatgtccgttatataatctacaaaacaatcatcgcatatagtatgcgatagtagagtaaacatttttatagtttttactggattcatacatcgtctacccaattcggttataaatgaaattgtcgccaatcttacacccaaccccttgttatccattagcatagtattaacttcgttatttatgtcataaactgtaaatgattttgtagatgccatatcatacatgatattcatgtccctattataatcattactaactttatcacaatatatgttgataatatctatatatgatctagtctttgtgggcaactgtctatacaagtcgtctaaacgttgtttactcatatagtatcgaacagccatcattacatggtcccgttccgttgatagataatcgagtatgttagtggacttgtcaaatctatataccatattttctggaagtggatatacatagtcgtgatcaacattattgctagcctcatcttctatatcctgtactataccattatctatatcatctacataatctatgatattattacacataaacatcgacaacatactattgtttattatctaagtcctgttgatccaaacccttgatctcctctatttgtactatctagagattgtacttcttccagttctggataatatatacgttgatagattagctgagctattctatctccagtatttacattaaacgtacattttccattattaataagaatgactcctatgtttcccctataatcttcgtctattacaccacctcctatatcaatgccttttagtgacagaccagacctaggagctattctaccatagcagaacttaggcatggacatactaatatctgtcttaattaactgtctttctcctggagggatagtataatcgtaagcgctatacaaatcatatccggcagcacccggcgattgcctagtaggagatttagctctgttagtttccttaacaaatctaactggtgagttaatattcatgttgaacataaaactaatattttatttcaaaattatttaccatcccatatattccatgaataagtgtgatgattgtacacttctatagtatctatatacgatccacgataaaatcctcctatcaatagcagtttattatccactatgatcaattctggattatccctcggataaataggatcatctatcagagtccatgtattgctggattcacaataaaattccgcatttctaccaaccaagaataaccttctaccgaacactaacgcgcatgatttataatgaggataataagtggatggtccaaactgccactgatcatgattgggtagcaaatattctgtagttgtatcagtttcagaatgtcctcccattacgtatataacattgtttatggatgccactgctggattacatctaggtttcagaagactcggcatattaacccaagcagcatccccgtggaaccaacgctcaacagatgtgggatttggtagacctcctactacgtataatttattgttagcgggtatcccgctagcatacagtctggggctattcatcggaggaattggaatccaattgtttgatatataatttaccgctatagcattgttatgtatttcattgttcatccatccaccgatgagatatactacttctccaacatgagtacttgtacacatatggaatatatctataatttgatccatgttcataggatactctatgaatggatacttgtatgatttgcgtggttgtttatcacaatgaaatattttggtacagtctagtatccattttacattatttatacctctgggagaaagataatttgacctgattacatttttgataaggagtagcagatttcctaatttatttcttcgctttatataccacttaatgacaaaatcaactacataatcctcatctggaacatttagttcatcgctttctagaataagtttcatagatagataatcaaaattgtctatgatgtcatcttccagttccaaaaagtgtttggcaataaagtttttagtatgacataagagattggatagtccgtattctatacccatcatgtaacactcgacacaatattcctttctaaaatctcgtaagataaagtttatacaagtgtagatgataaattctacagaggttaatatagaagcacgtaataaattgacgacgttatgactatctatatatacctttccagtatacgagtaaataactatagaagttaaactgtgaatgtcaaggtctagacaaaccctcgtaactggatctttatttttcgtgtatttttgacgtaaatgtgtgcgaaagtaaggagataactttttcaatatcgtagaattgactattatattgcctcctatggcatcaataattgttttgaatttcttagtcatagacaatgctaatatattcttacagtacacagtattgacaaatatcggcatttatgtttctttaaaagtcaacatctagagaaaaatgattatctttttgagacataactcccattttttggtattcacccacacgtttttcgaaaaaattagtttttccttccaatgatatattttccatgaaatcaaacggattggtaacattataaatttttttaaatcccaattcagaaatcaatctatccgcgacgaattctatatatgttttcatcatttcacaattcattcctataagtttaactggaagagccgcagtaagaaattcttgttcaatggataccgcatctgttataatagatctaacggtttcttcactcggtggatgcaataaatgtttaaacatcaaacatgcgaaatcgcagtgcagaccctcgtctctactaattagttcgttggaaaacgtgagtccgggcattaggccacgctttttaagccaaaatatggaagcgaatgatccggaaaagaagattccttctactgcagcaaaggcaataagtctctctccataaccggcgctgtcatgtatccacttttgagcccaatcggccttcttttttacacaaggcatcgtttctatggcattaaagagatagtttttttcattactatctttaacataagtatcgatcaaaagactatacatttccgaatgaatgttttcaatggccatctgaaatccgtagaaacatctagcctcggtaatctgtacttctgtacaaaatcgttccgccaaattttcattcactattccgtcactggctgcaaaaaacgccaatacatgttttataaaatatttttcgtctggtgttagtttattccaatcattgatatctttagatatatctacttcttccactgtccaaaatgatgcctctgcctttttatacatgttccagatgtcatgatattggattgggaaaataacaaatctatttggatttggtgcaaggatgggttccataactaaattaacaataacaataaattttttttcagttatctatatgcctgtacttggattttttgtacatcgatatcgccgcaatcactacaataattacaagtattattgatagcattgttattagtactatcataattaaattatctacattcatgggtgctgaataatcgttattatcatcattatcattttgtaattgtgacatcatactagataaatcgtttgcgagattgttgtgggaagcgggcatggaggatgcattatcattattatttaacgccttccatttggattcacaaatgttacgcacattcaacattttatggaaactataattttgtgaaaacaaataacaagaaaactcgtcatcgttcaaatttttaacgatagtaaaccgattaaacgtcgagctaatttctaacgctagcgactctgttggatatgggtttccagatatatatcttttcagttcccctacgtatctataatcatctgtaggaaatggaagatatttccatttatctactgttcctaatatcatatgtggtggtgtagtagaaccattaagcgcgaaagatgttatttcgcatcgtattttaacttcgcaataatttctggttagataacgcactctaccagtcaagtcaatgatattagcctttacagatatattcatagtagtcgtaacgatgactccatcttttagatgcgatactcctttgtatgtaccagaatcttcgtacctcaaactcgatatatttaaacaagttaatgagatattaacgcgttttatgaatgatgatatataaccagaagttttatcctcggtggctagcgctataaccttatcattataataccaactagtgtgattaatatgtgacacgtcagtgtgggtacaaatatgtacattatcgtctacgtcgtattcgatacatccgcatacagccaacaaatataaaatgacaaatactctaacgacgttcgtacccatcttgatgcggtttaataaatgttttgatttcaatttattgtaaaaaaagattcggttttatactgttcgatattctcattgcttatattttcatctatcatctccacacagtcaaatccgtggttagcatacacctcatcaaccggtaaaagactatcggactcttctatcattataactctagaatatttaatttggtcattattaatcaagtcaattatcttatttttaacaaacgtgagtattttactcattttttataaaaacttttagaaatatacagactctatcgtgtgtctatatcttctttttatatccaatgtatttatgtctgatttttcttcatttatcatatataatggtccaaattctacacgtgcttcggattcatccagatcattaaggttcttataattgtaacatccttctcttccctcttctacatcttccttcttattcttattcttagcgtcacagaatctaccacagcaggatcccatgacgagcgtcatattaaactaatccattttcaattataatatatgattagtaatgaccattaaaataaaaaatattcttcataaccggcaagaaagtgaaaagttcacattgaaactatgtcagtagtatacatcatgaaatgatgatatatatatactctattttggtggaggattatatgatataattcgtggataatcatttttaagacacatttctttattcgtaaatcttttcacgttaaatgagtgtccatattttgcaatttcttcatatgatggcggtgtacgtggacgaggctgctcctgttcttgttgtggtcgccgactgtcgtgtctgcgtttagatccctccattatcgcgattgcgtagatggagtactattttataccttgtaattaaatttttttattaattaaacgtataaaaacgttccgtatctgtatttaagagccagatttcgtctaatagaacaaatagctacagtaaaaataactagaataattgctacacccactagaaaccacggatcgtaatacggcaatcggttttcgataataggtggaacgtatattttatttaaggacttaacaattgtctgtaaaccacaatttgcttccgcggatcctgtattaactatctgtaaaagcatatgttgaccgggcggagccgaacattctccgatatctaatttctgtatatctataatattattaacctccgcatacgcattacagttcttttctagcttggataccgcactaggtacatcgtctagatctattcctatttcctcagcgatagctcttctatccttttccggaagcaatgaaatcacttcaataaatgattcaaccatgagtgtgaaactaagtcgagaattactcatgcatttgttagttattcggagcgcgcaatttttaaactgtcctataacctctcctatatgaatagcacaagtgacattagtagggatagaatgttgagctaatttttgtaaataactatctataaaaagattatacaaagttttaaactctttagtttccgccatttatccagtctgagaaaatgtctctcataataaatttttccaagaaactaattgggtgaagaatggaaacctttaatctatatttatcacagtctgttttggtacacatgatgaattcttccaatgccgtactaaattcgatatctttttcgatttctggatatgtttttaataaagtatgaacaaagaaatggaaatcgtaataccagttatgtttaactttgaaattgttttttattttcttgttaatgattccagccacttgggaaaagtcaaagtcgtttaatgccgatttaatacgttcattaaaaacaaactttttatcctttagatgaattattattggttcattggaatcaaaaagtaagatattatcgggtttaagatctgcgtgtaaaaagttgtcgcaacagggtagttcgtagattttaatgtataacagagccatctgtaaaaagataaactttatgtattgtaccaaagatttaaatcctaatttgatagctaactcggtatctactttatctgccgaatacagtgctaggggaaaaattataatgtttcctctttcatattcgtagttagttctcttttcatgttcgaaaaagtgaaacatgcggttaaaatagtttataacattaatattactgttaataactgccggataaaagtgggatagtaatttcacgaatttgatactgtcctttctctcgttaaacgcctttaaaaaaactttagaagaatatctcaatgagagttcctgaccatccatagtttgtatcaataatagcaacatatgaagaacacgtttatacagagtatgtaaaaatgttaatttatagtttaatcccatggcccacgcacacacgattaattttttttcatctccctttagattgttgtatagaaatttgggtactgtgaactccgccgtagtttccatgggactatataattttgtggcctcgaatacaaattttactacatagttatctatcttaaagactataccatatcctcctgtagatatgtgataaaaatcgtcgtttataggataaaatcgtttatccttttgttggaaaaaggatgaattaatgtaatcattctcttctatctttagtagtgtttccttattaaaattcttaaaataatttaacaatctaactgacggagcccaattttggtgtaaatctaattgggacattatattgttaaaatacaaacagtctcctaatataacagtatctgataatctatggggagacatccattgatattcaggggatgaatcattggcaacacccatttattgtacaaaaagccccaatttacaaacgaaagtccaggtttgatagagacaaacaattaactattttgtctctgtttttaacacctccacagtttttaatttctttagtaatgaaattattcacaatatcagtatcttctttatctaccagagattttactaacttgataaccttggctgtctcattcaatagggtagtaatatttgtatgtgtgatattgatatctttttgaattgtttcttttagaagtgattctttgatggtgccagcatacgaattacaataatgcagaaactcggttaacatgcaggaattatagtaagccaattccaattgttgcctgtgttgtattagagtgtcaatatgagcaatggtgtccttgcgtttctctgatagaatgcgagcagcgattttggcgttatcatttgacgatatttctggaatgacgaatcctgtttctactaactttttggtaggacaaagtgaaacaatcaagaagatagcttctcctcctatttgtggaagaaattgaactcctctagatgatctactgacgatagtatctccttgacagatattggaccgaattacagaagtacctggaatgtaaagccctgaaaccccctcattttttaagcagattgttgccgtaaatcctgcactatgcccaagatagagagctcctttggtgaatccatctctatgtttcagtttaaccaagaaacagtcagctggtctaaaatttccatctctatctaatacagcatctaacttgatgtcaggaactatgaccggtttaatgttatatgtaacattgagtaaatccttaagttcataatcatcactgtcatcagttatgtacgatccaaacaatgtttctaccggcatagtggatacgaagatgctatccatcagaatgtttccctgattagtattttctatatagctattcttctttaaacgattttccaaatcagtaactatgttcatttttttaggagtaggacgcctagccagtatggaagaggattttctagatcctctcttcaacatctttgatctcgatggaatgcaaaaccccatagtgaaacaaccaacgataaaaataatattgtttttcactttttataattttaccatctgactcatggattcattaatatctttataagagctactaacgtataattctttataactgaactgagatatatacaccggatctatggtttccataattgagtaaatgaatgctcggcaataactaatggcaaatgtatagaacaacgaaattatactagagttgttaaagttaatattttctatgagctgttccaataaattatttgttgtgactgcgttcaagtcataaatcatcttgatactatccagtaaaccgtttttaagttctggaatattatcatcccattgtaaagcccctaattcgactatcgaatatcctgctctgatagcagtttcaatatcgacggacgtcaatactgtaataaaggtggtagtattgtcatcatcgtgataaactacgggaatatggtcgttagtaggtacggtaactttacacaacgcgatatataactttccttttgtaccatttttaacgtagttgggacgtcctgcagggtattgttttgaagaaatgatatcgagaacagatttgatacgatatttgttggattcctgattattcactataatataatctagacagatagatgattcgataaatagagaaggtatatcgttggtaggataatacatccccattccagtattctcggatactctattgatgacactagttaagaacatgtcttctattctagaaaacgaaaacatcctacatggactcattaaaacttctaacgctcctgattgtgtctcgaatgcctcgtacaaggatttcaaggatgccatagattctttgaccaacgatttagaattgcgtttagcatctgatttttttattaaatcgaatggtcggctctctggtttgctaccccaatgataacaatagtcttgtaaagataaaccgcaagaaaatttatacgcatccatccaaataaccctagcaccatcggatgatattaatgtattattatagattttccatccacaattattgggccagtatactgttagcaacggtatatcgaatagattactcatgtaacctactagaatgatagttcgtgtactagtcataatatctttaatccaatctaaaaaatttaaaattagattttttacactgttaaagttaacaaaagtattacccgggtacgtggatatcatatatggcattggtccattatcagtaatagctccataaactgatacggcgatggtttttatatgtgtttgatctaacgaggaagaaattcgcgcccacaattcatctctagatatgtatttaatatcaaacggtaacacatcaatttcgggacgcgtatatgtttctaaatttttaatccaaatataatgatgacctatatgccctattatcatactgtcaactatagtacacctagggaacttacgatacatctgtttcctataatcgttaaattttacaaatctataacatgctaaaccttttgacgacagccattcattaatttctgatatggaatctgtattctcgataccgtatcgttctaaagccagtgctatatctccctgttcgtgggaacgctttcgtataatatcgatcaacggataatctgaagtttttggagaataatatgactcatgatctatttcgtccataaacaatctagacataggaattggaggcgatgatcttaattttgtgcaatgagtcgtcaatcctataacttctaatcttgtaatattcatcatcgacataatactatctatgttatcatcgtatattagtataccatgaccttcttcatttcgtgccaaaatgatatacagtcttaaatagttacgcaatatctcaatagtttcataattgttagctgttttcatcaaggtttgtatcctgtttaacatgatggcgttctataacgtctctattttctatttttaattttttaaatttttaacgatttactgtggctagatacccaatctctctcaaatatttttttagcctcgcttacaagctgtttatctatactattaaaactgacgaatccgtgattttggtaatgggttccgtcgaaatttgccgaagtgatatgaacatattcgtcgtcgactatcaacaattttgtattattctgaatagtgaaaaccttcacagatagatcattttgaacacacaacgcatctagacttttggcggttgccatagaatatacgtcgttcttatcccaattaccaactagaagtctgatcttaactcctctattaatggctgcttctataatggagttgtaaatgtcgggccaatagtagctattaccgtcgacacgtgtagtgggaactatggccaaatgttcaatatctatactagtcttagctgacctgagtttatcaataactacatcggtatctagatctctagaatatcccaataggtgttccggagaatcagtaaagaacactccacctataggattcttaatatgatacgcagtgctaactggcaaacaacaagccgcagagcataaattcaaccatgaattttttgcgctattaaaggctttaaaagtatcaaatcttctacgaagatctgtggccagcgggggataatcagaatatacacctaacgttttaatcgtatgtatagatcctccagtaaatgacgcgtttcctacataacatctttcatcatctgacacccaaaaacaaccgagtagtagtcccacattattttttttatctatattaacggttataaaatttatatccgggcagtgactttgtagctctcccagatttcttttccctcgttcatctagcaaaactattattttaatccctttttcagatgcctcttttagtttatcaaaaataagcgctcccctagtcgtactcagaggattacaacaaaaagatgctatgtatatatatttcttagctagagtgataatttcgttaaaacattcaaatgttgttaaatgatcggatctaaaatccatattttctggtagtgtttctaccagcctacattttgctcccgcaggtaccgatgcaaatggccacatttagttaacataaaaacttatacatcctgttctatcaacgattctagaatatcatcggctatatcgctaaaattttcatcaaagtcgacatcacaacctaactcagtcaatatattaagaagttccatgatgtcatcttcgtctatttctatatccgtatccattgtagattgttgaccgattatcgagtttaaatcattactaatactcaatccttcagaatacaatctgtgtttcattgtaaatttataggcggtgtatttaagttggtagattttcaattatgtattaatatagcaacagtagttcttgctcctccttgattctagcatcctcttcattattttcttctacgtacataaacatgtccaatacgttagacaacacaccgacgatggcggccgctacagacacgaatatgactaaaccgatgaccatttaaaaacccctctctagctttcacttaaactgtatcgatcattcttttagcacatgtataatataaaaacattattctatttcgaatttaggcttccaaaaatttttcatccgtaaaccgataataatatatatagacttgttaatagtcggaataaatagattaatgcttaaactatcatcatctccacgattagagatacaatatttacattctttttgctgtttcgaaactttatcaatacacgttaatacaaacccaggaaggagatattgaaactgaggctgttgaaaatgaaacggtgaatacaataattcagataatgtaaaatcatgattccgtattctgatgatattagaactgctaatggatgtcgatggtatgtatctaggagtatctattttaacaaagcatcgatttgctaatatacaattatccttttgattaattgttattttattcatattcttaaaaggtttcatatttatcaattcttctacattaaaaatttccatttttaatttatgtagccccgcaatactcctcattacgtttcattttttgtctataatatccattttgttcatctcggtacatagattatccaattgagaagcgcatttagtagttttgtacattttaagtttattgacgaatcgtcgaaaactagttatagttaacattttattatttgataccctgatattaatacccctgccgttactattatttataactgatgtaatccacgtaacattggaattaactatcgatagtaatgcatcgacgcttccaaaattgtctattataaactcaccgataatttttttattgcatgttttcatattcattaggattatcaaatctttaatcttattacgattgtatgcgttgatattacaagacgtcattctaaaagacggaggatctccatcaaatgccagacaatcacgtacaaagtacatggaaataggttttgttctattgcgcatcatagatttatatagaacacccgtagaaatactaatttgttttactctataaaatactaatgcatctatttcatcgttttgtataacgtctttccaagtgtcaaattccaaatttttttcattgatagtaccaaattcttctatctctttaactacttgcatagataggtaattacagtgatgcctacatgccgttttttgaaactgaatagatgcgtctagaagcgatgctacgctagtcacaatcaccactttcatatttagaatatatatatgtaaaaatatagtagaatttcattttgtttttttctatgctataaatgaattctcattttgcatctgctcatactccgttttatattaataccaaagaaggaagatatctggttctaaaagccgttaaagtatgcgatgttagaactgtagaatgcgaaggaagtaaagcttcctgcgtactcaaagtagataaaccctcatcgcccgcgtgtgagagaagaccttcgtccccgtccagatgcgagagaatgaataaccctggaaaacaagttccgtttatgaggacggacatgctacaaaatatgttcgcggctaatcgcgataatgtagcttctagacttttgtcctaaaatactattatatccttttcgatattaataaatccgtgtcgtccaggttttttatctctttcagtatgtgaatagataggtattttatctctattcatcatcgaatttaagagatccgataaacattgtttgtattctccagatgtcagcatctgatacaacaatatatgtgcacataaacctctggcacttatttcatgtaccttccccttatcactaaggagaatagtatttgagaaatatgtatacatgatattatcatgaattagatatacagaatttgtaacactctcgaaatcacacgatgtgtcggcgttaagatctaatatatcactcgataacacattttcatctagatacactagacattttttaaagctaaaatagtctttagtagtaacagtaactatgcgattattttcatcgatgatacatttcatcggcatattattacgcttaccatcaaagactataccatgtgtatatctaacgtattctagcatggttgccatacgcgcattaaacttttcaggatctttggatagatcttccaatctatctatttgagaaaacatttttatcatgttcaatagttgaaacgtcggatccactatatagatattatctataaagattttaggaactacgttcatggtatcctggcgaatattaaaactatcaatgatatgattatcgttttcatcttttatcaccatatagtttctaagatatgggattttacttaatataatattatttcccgtgataaattttattagaaaggccaaatctataagaaaagtcctagaattagtctgaagaatatctatatcgccgtatagtatatttggattaattagatatagagaatatgatccgtaacatatacaacttttattatggcgtctaagatattcttccatcaacttattaacatttttgactagggaagatacattatgacgtcccattacttttgccttgtctattactgcgacgttcatagaatttagcatatctcttgccaattcttccattgatgttacattataagaaattttagatgaaattacatttggagctttaatagtaagaactcctaatatgtccgtgtatgtggtcactaatacagattgtagttctataatcgtaaataatttacctatattatatgtttgagtctgtttagaaaagtagctaagtatacgatcttttatttctgatgcagatgtattaacatcggaaaaaaatctttttttattcttttttactaaagatacaaatatgtctttgttaaaaacagttattttctgaatatttctagcttgtaattttaacatatgatattcgttcacactaggtactctgcctaaataggtttctataatctttaatgtaatattaggaaaagtattctgatcaggattcctattcattttgaggatttaaaactctgattattgtctaatatggtctctacgcaaactttttcacagagcgatagagtttttgataactcgtttttcttaagaaatataaaactactgtctccagagctcgctctatcttttattttatctaattcgatacaaactcctgatactggttcagaaagtaattcattaattttcagtcctttatagaagatatttaatatagataatacaaaatcttcagtttttgatatcgatctgattgatcctagaactagatatattaataacgtgctcattaggcagtttatggcagcttgataattagatatagtatattccagttcatatttattagataccgcattgcccagattttgatattctatgaattcctctgaaaataaatccaaaataactagacattctattttttgtggattagtgtactctcttccctctatcatgttcactactggtgtccacgatgataaatatctagagggaatataatatagtccataggatgccaatctagcaatgtcgaataactgtaattttattcttcgctcttcattatgaattgattcttgaggtataaacctaacacaaattatattattagacttttcgtatgtaatgtctttcatgttataagtttttaatcctggaatagaatctattttaatgaggcttttaaacgcagagttctccaacgagtcaaagcataatactctgttgtttttcttatatacgatgttacgattttcttctttgaatggaataggtttttgaattagtttataattacaacataatagataaggaagtgtgcaaatagtacgcggaaaaaacataatagctcccctgttttcatccatggttttaagtaaatgatcactggcttctttagtcaatggatattcgaacattaaccgtttcatcatcattggacagaatccatatttcttaatgtaaagagtgatcaaatcattgtgtttattgtaccatcttgttgtaaatgtgtattcggttatcggatctgctcctttttctattaaagtatcgatgtcaatctcgtctaagaattcaactatatcgacatatttcatttgtatacacataaccattactaacgtagaatgtataggaagagatgtaacgggaacagggtttgttgattcgcaaactattctaatacataattcttctgttaatacgtcttgcacgtaatctattatagatgccaagatatctatataattattttgtaagatgatgttaactatgtgatctatataagtagtgtaataattcatgtattttgatatatgttccaactctgtctttgtgatgtctagtttcgtaatatctatagcatcctcaaaaaatatattcgcatatattcccaagtcttcagttctatcttctaaaaaatcttcaacgtatggaatataataatctattttacctcttctgatatcattaatgatatagtttttgacactatcttctgtcaattgattcttattcactatatctaagaaacggatagcgtccctaggacgaactactgccattaatatctctattatagcttctggacataattcatctattataccagaattaatgggaactattccgtatctatctaacatagttttaagaaagtcagaatctaagacctgatgttcatatattggttcatacatgaaatgatctctattgatgatagtgactatttcattctctgaaaattggtaactcattctatatatgctttccttgttgatgaaggatagaatatactcaatagaatttgtaccaacaaactgttctcttatgaatcgtatatcatcatctgaaataatcatgtaaggcatacatttaacaattagagacttgtctcctgttatcaatatactattcttgtgataatttatgtgtgaggcaaatttgtccacgttctttaattttgttatagtagatatcaaatccaatggagctacagttcttggcttaaacagatatagtttttctggaacaaattctacaacattattataaaggactttgggtaaataagtgggatgaaatcctattttaattaatgcgatagccttgtcctcgtgcagatatccaaacgcttttgtgatagtatggcattcattgtctagaaacgctctacgaatatctgtgacagatatcatctttagagaatatactagtcgcgttaatagtactacaatttgtattttttaatctatctcaataaaaaaattaatatgtatgattcaatgtataactaaactactaactgttattgataactagaatcagaatctaatgatgacgtacccaagaagtttatctactgccaatttagctgcattatttttagcatctcgtttagattttccatctgccttatcgaatactcttccgtcgatatctacacaggcataaaatgtaggagagttactaggcccaactgattcaatacgaaaagaccaatctctcttagttatttggcagtactcattaataacggtgacagggttagcatctttccaatcaataatttttttagccggaataacatcatcaaaagacttatgatcctctctcattgatttttcgcgggatacatcatctattatgacgtcagccataacatcagcatccggcttatccgcctccgttgtcataaaccaacgaggaggaatatcgtcggagctgtacaccatagcactacgttgaagatcgtacagagctttattaacttctcgcttctccatattaagttgtctagttagttgtgcagcagtagctccttcgattccaatggttttaatagcctcacacacaatctctgcgttagaacgttcgtcgatatagattttagacatttttagagagaactaacacaaccagcaataaaactgaacctactttatcatttttttattcatcatcctctggtggttcgtcgttcctatcaaatgtagctctgattaacccgtcatctataggtgatgctggttctggagattctggaggagatggattattatctggaagaatctctgttatttccttgttttcatgtatcgattgcgttgtaacattaagattgcgaaatgctctaaatttgggaggcttaaagtgttgtttgcaatctctacacgcgtgtctaactagtggaggttcgtcagctgctctagtttgaatcatcatcggcgtagtattcctacttttacagttaggacacggtgtattgtatttctcgtcgagaacgttaaaataatcgttgtaactcacatcctttattttatctatattgtattctactcctttcttaatgcattttataccgaataagagatagcgaaggaattctttttcggtgccgctagtacccttaatcatatcacatagtgttttatattccaaatttgtggcaatagacggtttatttctatacgatagtttgtttctggaatcctttgagtattctataccaatattattctttgattcgaatttagtttcttcgatattagattttgtattacctatattcttgatgtagtactttgatgatttttccatggcccattctattaagtcttccaagttggcatcatccacatattgtgatagtaattctcggatatcagtagcggctaccgccattgatgtttgttcattggatgagtaactactaatgtatacattttccatttataacacttatgtattaactttgttcatttatattttttcattattatgttgatattaacaaaagtgaatatatatatatgttaataattgtattgtggttatacggctacaattttataatgagtgaaagtcagtgtccgatgatcaatgacgatagctttactctgaaaagaaagtatcaaatcgatagtgcggagtcaacaataaaaatggataagaagaggataaagtttcagaatagagccaaaatggtaaaagaaataaatcagacaataagagcagcacaaactcattacgagacattgaaactaggatacataaaatttaagagaatgattaggactactactctagaagatatagcaccatctattccaaataatcagaaaacttataaactattctcggacatttcagccatcggcaaagcatcacagaatccgagtaagatggtatatgctctgctgctttacatgtttcccaatttgtttggagatgatcatagattcattcgttatagaatgcatccaatgagtaaaatcaaacacaagatcttctctcctttcaaacttaatcttattagaatattagtggaagaaagattctataataatgaatgcagatctaataaatggaaaataattggaacacaagttgataaaatgttgatagctgaatctgataaatatacaatagatgcaaggtataacctaaaacccatgtatagaatcaagggagaatctgaagaagataccctcttcatcaaacagatggtagaacaatgtgtgacatcccaggaattggtggaaaaagtgttgaagatactgtttagagatttgttcaagagtggagaatacaaagcgtacagatacgatgatgatgtagaaaatggattcattggattggatacactaaaattaaacattgttcatgatatagttgaaccatgtatgcctgttcgtaggccagtggctaagatactgtgtaaagaaatggtaaataaatactttgagaatccgctacatattattggtaaaaatcttcaagagtgcattgactttgttagtgaataggcatttcatctttctccaatactaattcaaattgttaaattaataatggatagtataaatagttattagttataagatagtaaaaataattattagaataagagtgtagtatcatagataactctcttctataaaaatggattttattcgtagaaagtatcttatatacacagtagaaaataatatagattttttaaaggatgatacattaagtaaagtaaacaattttaccctcaatcatgtactagctctcaagtatctagttagcaattttcctcaacatgttattactaaggatgtattagctaataccaatttttttgttttcatacatatggtacgatgttgtaaagtgtacgaagcggttttacgacacgcatttgatgcacccacgttgtacgttaaagcattgactaagaattatttatcgtttagtaacgcaatacaatcgtacaaggaaaccgtgcataaactaacacaagatgaaaaatttttagaggttgccgaatacatggacgaattaggagaacttataggcgtaaattatgacttagttcttaatccattatttcacggaggggaacccatcaaagatatggaaatcatttttttaaaactgtttaagaaaacagacttcaaagttgttaaaaaattaagtgttataagattacttatttgggcatacctaagcaagaaagatacaggcatagagtttgcggataatgatagacaagatatatatactctatttcaacaaactggtagaatcgtccatagcaatctaacagaaacgtttagagattatatctttcccggagataagactagctattgggtgtggttaaacgaaagtatagctaatgatgcggatatcgttcttaatagacccgccattaccatgtatgataaaattcttagttatatatactctgagataaaacaaggacgcgttaataaaaacatgcttaagttagtttatatctttgagcctgaaaaagatatcagagaacttctgctagaaatcatatatgatattcctggagatatcctatctattattgatgcaaaaaacgacgattggaaaaaatattttattagtttttataaagctaattttattaacggtaatacatttattagtgatagaacgtttaacgaggacttattcagagttgttgttcaaatagatcccgaatatttcgataatgaacgaattatgtctttattctctacgagtgctgcggacattaaacgatttgatgagttagatattaataacagttatatatctaatataatttatgaggtgaacgatatcacattagatacaatggatgatatgaagaagtgtcaaatctttaacgaggatacgtcgtattatgttaaggaatacaatacatacctgtttttgcacgagtcggatcccatggtcatagagaacggaatactaaagaaactgtcatctataaaatccaagagtagacggctgaacttgtttagcaaaaacattttaaaatattatttagacggacaattggctcgtctaggtcttgtgttagatgattataaaggagacttgttagttaaaatgataaaccatcttaagtctgtggaggatgtatccgcattcgttcgattttctacagataaaaaccctagtattcttccatcgctaatcaaaactattttagctagttataatatttccatcatcgtcttatttcaaaggtttttgagagataatctatatcatgtagaagaattcttggataaaagcatccatctaaccaagacggataagaaatatatacttcaattgataagacacggtagatcatagaacagaccaaatatattattaataatttgtatatacatagatataattatcacacatttttgataaatgggaactgctgcaacaattcagactcccaccaaattaatgaataaagaaaatgcagaaatgattttggaaaaaattgttgatcatatagttatgtatattagtgacgaatcaagtgattcagaaaataatcctgaatatattgattttcgtaacagatacgaagactatagatctctcattataaaaagtgatcacgagtttgtaaagctatgtaaaaatcatgcggagaaaagttctccagaaacgcaacaaatgattatcaaacacatatacgaacaatatcttattccagtatctgaagtactattaaaacctataatgtccatgggtgacataattacatataacggatgtaaagacaatgaatggatgctagaacaactctctaccctaaactttaacaatctccgcacatggaactcatgtagcataggcaatgtaacgcgtctgttttatacattttttagttatctgatgaaagataaactaaatatataagtataatcccattctaatactttaacctgatgtattagcatcttattagaatattaacctaactaaaagacataacataaaaactcattacatagttgataaaaagcggtaggatataaatattatggctgccaccgttccgcgttttgacgacgtgtacaaaaatgcacaaagaagaattctagatcaagaaacattttttagtagaggtctaagtagaccgttaatgaaaaacacatatctatttgataattacgcgtatggatggataccagaaactgcaatttggagtagtagatacgcaaacttagatgcaagtgactattatcccatttcgttgggattacttaaaaagttcgagtttctcatgtctctatataaaggtcctattccagtatacgaagaaaaagtaaatactgaattcattgctaatggatctttctccggtagatacgtatcatatcttagaaagttttctgctcttccaacaaacgagtttattagttttttgttactgacttccattccaatctataatatcttgttctggtttaaaaatactcagtttgatattactaaacacacattattcagatacgtctatacagataatgccaaacacctggcgttggctaggtatatgtatcaaacaggagactataagcctttgtttagtcgtctcaaagagaattatatatttaccggtcccgttccaatatgtatcaaagatatagatcaccctaatcttagtagagcaagaagtccatccgattatgagacattagctaatattagtactatattgtactttaccaagtatgatccggtattaatgtttttattgttttacgtacctgggtattcaattactacaaaaattactccagccgtagaatatctaatggataaactgaatctaacaaagagcgacgtacaactgttgtaaattattttatgcttcgtaaaatgtaggttttgaaccaaacattctttcaaagaatgagatgcataaaactttattatccaatagattgactatttcggacgtcaatcgtttaaagtaaacttcgtaaaatattctttgatcactgccgagtttaaaacttctatcgataattgtttcatatgttttaatatttacaagttttttggtccatggtccattaggacaaatatatgcaaaataatatcgttctccaagttctatagtctctggattatttttattatattcagtaaccaaatacatattagggttatctgcggatttataatttgagtgatgcattcgactcaacataaataattctagaggagacgatctactatcaaattcggatcgtaaatctgtttctaaagaacggagaatatctatacatacctgattagaattcatccgtccttcagacaacatctcagacagtctggttttgtacatcttaatcatattcttatgaaacttggaaacatctcttctagtttcactagtacctttattaattctctcaggtacagattttgaattcgacgatgctgagtatttcatcgttgtatatttcttcttcgattgcataatcagattcttatataccgcctcaaactctattttaaaattattaaacaatactctattattaatcagtcgttctaactctttcgctatttctatagacttatctacatcttgactgtctatctctgtaaacacggagtcggtatctccatacacgctacgaaaacgaaatctgtaatctataggcaacgatgttttcacaatcggattaatatctctatcgtccatataaaatggattacttaatggattggcaaaccgtaacataccgttagataactctgctccatttagtaccgattctagatacaagatcattctacgtcctatggatgtgcaactcttagccgaagcgtatgagtatagagcactatttctaaatcccatcagaccatatactgagttggctactatcttgtacgtatattgcatggaatcatagatggccttttcagttgaactggtagcctgttttagcatctttttatatctggctctctctgccaaaaatgttcttaatagtctaggaatggttccttctatcgatctatcgaaaattgctatttcagagatgaggttcggtagtctaggttcacaatgaaccgtaatatatctaggaggtggatatttctgaagcaatagctgattatttatttcttcttccaatctattggtactaacaacgacaccgactaatgtttccggagatagatttccaaagatacacacattaggatacagactgttataatcaaagattaatacattattactaaacattttttgttttggagcaaataccttaccgccttcataaggaaacttttgttttgtttctgatctaactaagatagttttagtttccaacaatagctttaacagtggacccttgatgactgtactcgctctatattcgaataccatggattgaggaagcacatatgttgacgcacccgcgtctgtttttgtttctactccataatactcccacaaatactgacacaaacaagcatcatgaatacagtatctagccatatctaaagctatgtttagattataatccttatacatctgagctaaatcaacgtcatcctttccgaaagataatttatatgtatcattaggtaaagtaggacataatagtacgactttaaatccattttcccaaatatctttacgaattactttacatataatatcctcatcaacagtcacataattacctgtggttaaaacctttgcaaatgcagcggctttgcctttcgcgtccgtagtatcgtcaccgatgaacgtcatttctctaactcctttatttaatactttacccatgcaactgaacgcgttcttggatatagaatccaatttgtacgaatccaatttttcaaatttttgaatgaatgaatatagatcgaaaaatatagttccattattgttattaacgtgaaacgtagtattggccatgccgcctactcccttatgactagactgatttctctcataaatacagagatgtacagcttcctttttgtccggagatctaaagataatcttctctcctgttaataactctagacgattagtaatatatctcagatcaaagttatgtccgttaaaggtaacgacatagtcgaacgttagttccaacaattgtttagctattcgtaacaaaactatttcagaacataaaactagttctcgttcgtaatccatttccattagtgactgtatcctcaaacatcctctatcgacggcttcttgtatttcctgttccgttaacatctcttcattaatgagcgtaaacaataatcgtttaccacttaaatcgatataacagtaacttgtatgcgagattgggttaataaatacagaaggaaacttcttatcgaagtgacactctatatctagaaataagtacgatcttgggatatcgaatctaggtatttttttagcgaaacagttacgtggatcgtcacaatgataacatccattgttaatctttgtcaaatattgctcgtccaacgagtaacatccgtctggagatatcccgttagaaatataaaaccaactaatattgagaaattcatccatggtggcattttgtatgctgcgtttctttggctcttctatcaaccacatatctgcgacggagcattttctatctttaatatctagattataacttattgtctcgtcaatgtctatagttctcatctttcccaacggcctcgcattaaatggaggaggagacaatgactgatatatttcgtccgtcactacgtaataaaagtaatgaggaaatcgtataaatacggtctcaccatttcgacatctggatttcagatataaaaatctgttttcaccgtgactttcaaaccaattaatgcaccgaacatccatttatagaatttagaaatatattttcatttaaatgaatcccaaacattggggaagagccgtatggaccattatttttatagtactttcgcaagcgggtttagacggcaacatagaagcgtgtaaacgaaaactatatactatagttagcactcttccatgtcctgcatgtagacggcacgcgactatcgctatagaggacaataatgtcatgtctagcgatgatctgaattatatttattattttttcatcagattatttaacaatttggcatctgatcccaaatacgcgatcgatgtgacaaaggttaaccctttataaacttaacccattataaaacttatgattagtcacaactgaaataaccgcgtgattattttttggtataattctacacggcatggtttctgtgactatgaattcaacccccgttacattagtgaaatctttaacaaacagcaagggttcgtcaaagacataaaactcattgtttacaatcgaaatagaccccctatcacacttaaaataaaaaatatccttatcctttaccaccaaataaaattctgattggtcaatgtgaatgtattcacttaacagttccacaaatttatttattaactccgaggcacatacatcgtcggtattttttatggcaaactttactcttccagcatccgtttctaaaaaaatattaacgagttccatttatatcatccaatattattgaaatgacgttgatggacagatgatacaaataagaaggtacggtacctttgtccaccatctcctccaattcatgctctattttgtcattaactttaatgtatgaaaacagtacgccacatgcttccatgacagtgtgtaacactttggatacaaaatgtttgacattagtataattgttcaagactgtcaatctataatagatagtagctataatatattctatgatggtattgaagaagatgacaaccttggcatattgatcatttaacacagacatggtatcaacagatagcttgaatgaaagagaatcagtaattggaataagcgtcttctcgatagagtgtccgtataccaacatgtctgatattttgatgtattccattaaattatttagttttttctttttattctcgttaaacagcatttctgtcaacggaccccaacatcgttgaccgattaagttttgattgatttttccgtgtaaggcgtatctagtcagatcgtatagcctatccaataatccatcatctgtgcgtagatcacatcgtacactttttaattctctatagaagagcgacagacatctggagcaattacagacagcaatttctttattctctacagatgtaagatacttgaagacattcctatgatgatgcagaattttggataacacggtattgatggtatctgttaccataattcctttgatggctgatagtgtcagagcacaagatttccaatctttgacaatttttagcaccattatctttgttttgatatctatatcagacagcatggtgcgtctgacaacacagggattaagacggaaagatgaaatgattctctcaacatcttcaatagataccttgctattttttctggcattatctatatgtgcgagaatatcctctagagaatcagtatcctttttgatgatagtggatctcaatgacatgggacgtttaaaccttcttattctatcaccagattgcatggtgatttgtcttctttcttttatcataatgtaatctctaaattcatcggcaaattgtctatatctaaaatcataatatgagatgtttacctctacaaatatctgttcgtccaatgttagagtatttacatcagttttgtattccaaattaaacatggcaacggatttaattttatattcctctattaagtcctcgtcgataataacagaatgtagataatcatttaatccatcgtacatggttggaagatgcttgttgacaaaatctttaattgtcttgatgaaggtgggactatatctaacatcttgattaataaaatttataacattgtccataggatactttgtaactagttttatacacatctcttcatcggtaagtttagacagaatatcgtgaacaggtggtatattatattcatcagatatacgaagaacaatgtccaaatctatattgtttaatatattatatagatgtagcgtagctcctacaggaatatctttaactaagtcaatgatttcatcaaccgttagatctattttaaagttaatcatataggcattgatttttaaaaggtatgtagccttgactacattctcattaattaaccattccaagtcactgtgtgtaagaagattatattctatcataagcttgactacatttggtcccgataccattaaagaattcttatgatataaggaaacagcttttaggtactcatctactctacaagaattttggagagccttaacgatatcagtgacgtttattatttcaggaggaaaaaacctaacattgagaatatcggaattaatagcttccagatacagtgattttggcaatagtccgtgtaatccataatccagtaacacgagctggtgcttgctagacaccttttcaatgtttaatttttttgaaataagctttgataaagccttcctcgcaaattccggatacatgaacatgtcggcgacatgattaagtattgttttttcattattttctcaataccccaatagatgatagaatatcacccaatgcgtccatgttgtctatttccaacaggtcgctatatccaccaatagaagtttttccaaaaaagattctaggaacagttctaccaccagtaatttgttcaaaatagtcacgcaattcattttcgggtttaaattctttaatatcgacaatttcatacgctcctcttttgaaactaaacttatttagaatatccagtgcatttctacaaaaaggacatgtatacttgacaaaaattgtcactttgttattggccaacctttgttgtacaaattcctcggccattttaatatttaagtgatataaaactatctcgacttatttaactctttagtcgagatatatggacgcagatagctatatgatagccaactacagaaggcaaacgctataaaaaacataattacgacgagcatatttataaatatttttattcagcattacttgatatagtaatattaggcacagtcaaacattcaaccactctcgatacattaactctctcattttctttaacaaattctgcaatatcttcgtaaaaagattcttgaaactttttagaatatctatcgactctagatgaaatagcgttcgtcaacatactatgttttgtatacataaaggcgcccattttaacagtttctagtgacaaaatgctagcgatcctaggatcctttagaatcacatagattgacgattcgtctctcttagtaactctagtaaaataatcatacaatctagtacgcgaaataatattatccttgacttgaggagatctaaacaatctagttttgagaacatcgataagttcatcgggaatgacatacatactatctttaatagaactcttttcatccagttgaatggattcgtccttaaccaactgattaatgagatcttctattttatcattttccagatgatatgtatgtccattaaagttaaattgtgtagcgcttctttttagtctagcagccaatactttaacatcactaatatcgatatacaaaggagatgatttatctatggtattaagaattcgtttttcgacatccgtcaaaaccaattcctttttgcctgtatcatccagttttccatcctttgtaaagaaattattttctactagactattaataagactgataaggattcctccataattgcacaatccaaactttttcacaaaactagactttacaagatctacaggaatgcgtacttcaggttttttagcttgtgattttttcttttgcggacattttcttgtgaccaactcatctaccatttcattgattttagcagtgaaataagctttcaatgcacgggcactgatactattgaaaacgagttgatcttcaaattccgccatttaagttcaccaaacaacttttaaatacaaatatatcaatagtagtagaataagaactataaaaaaaataataattaaccaataccaaccccaacaaccggtattattagttgatgtgactgttttctcatcacttagaacagatttaacaatttctataaagtctgtcaaatcatcttccggagaccccataaatacaccaaatatagcggcgtacaacttatccatttatacattgaatattggcttttctttatcgctatcttcatcatattcatcatcaatatcaacaagtcccagattacgagccagatcttcttctacattttcagtcattgatacacgttcactatctccagagagtccgataacgttagccaccacttctctatcaatgattagtttcttgagcgcgaaagtaatttttgtttccgttccggatctatagaagacgataggtgtgataattgccttggccaattgtctttctcttttactgagtgattctagttcaccttctatagatctgagaatggatgattctccagtcgaaacatattctaccatggatccgtttaatttgttgatgaagatggattcatccttaaatgttttctctgtaatagtttccaccgaaagactatgcaaagaatttggaatgcgttccttgtgcttaatgtttccatagacggcttctagaagttgatacaacataggactagccgcggtaacttttatttttagaaagtatccatcgcttctatcttgtttagatttatttttataaagtttagtctctccttccaacataataaaagtggaagtcatttgactagataaactatcagtaagttttatagagatagacgaacaattagcgtattgagaagcatttagtgtaacgtattcgatacattttgcattagatttactaatcgattttgcatactctataacacccgcacaagtctgtagagaatcgctagatgcagtaggtcttggtgaagtttcaactctcttcttgattaccttactcatgattaaacctaaataattgtactttgtaatataatgatatatattttcactttatctcatttgagaataaaaatgtttttgtttaaccactgcatgatgtacagatttcggaatcgcaaaccaccagtggttttattttatccttgtccaatgtgaattgaatgggagcggatgcgggtttcgtacgtagatagtacattcccgtttttagaccgagactccatccgtaaaaatgcatactcgttagtttggaataactcggatctgctatatggatattcatagattgactttgatcgatgaaggctcccctgtctgcagccatttttatgatcgtcttttgtggaatttcccaaatagttttataaactcgcttaatatcttctggaaggtttgtattctgaatggatccaccatctgccataatcctattcttgatctcatcattccataattttctctcggttaaaactctaaggagatgcggattaactacttgaaattctccagacaatactctccgagtgtaaatattactggtatacggttccaccgactcattatttcccaaaatttgagcagttgatgcagtcggcataggtgccaccaataaactatttctaagaccgtatgttctgattttatcttttagaggttcccaattccaaagatccgacggtacaacattccaaagatcatattgtagaataccgttactggcgtacgatcctacatatgtatcgtatggtccttccttctcagctagttcacaactcgcctctaatgcaccgtaataaatggtttcgaagatcttcttatttagatcttgtgcttccaggctatcaaatggataatttaagagaataaacgcgtccgctaatccttgaacaccaataccgataggtctatgtctcttattagagatttcagcttctggaataggataataattaatatctataattttattgagatttctgacaattactttgaccacatccttcagtttgagaaaatcaaatcgcccatctattacaaacatgttcaaggcaacagatgccagattacaaacggctacctcattagcatccgcatattgtattatctcagtgcaaagattactacacttgatagttcctaaattttgttgattactctttttgttacacgcatccttataaagaatgaatggagtaccagtttcaatctgagattctataatcgctttccagacgactcgagcctttattatagatttgtatctcctttctctttcgtatagtgtatacaatcgttcgaactcgtctccccaaacattgtccaatccaggacattcatccggacacatcaacgaccactctccgtcatccttcactcgtttcataaagagatcaggaatccaaagagctataaatagatctctggttctatgttcctcgtttcctgtattctttttaagatcgaggaacgccataatatcagaatgccacggttccaagtatatggccataactccaggccgtttgtttcctccctgatctatgtatctagcggtgttattataaactctcaacattggaataataccgtttgatataccattggtaccggagatatagcttccactggcacgaatattactaattgatagacctattccccctgccattttagagattaatgcgcatcgttttaacgtgtcatagataccctctatgctatcatcgatcatgttaagtagaaaacagctagacatttggtgacgactagttcccgcattaaataaggtaggagaagcgtgcgtaaaccatttttcagaaagtagattgtacgtctcaatagctgagtctatatcccattgatgaattcctactgcgacacgcattaacatgtgctgaggtctttcaacgatcttgttgtttattttcaacaagtaggatttttccaaagttttaaaaccaaaatagttgtatgaaaagtctcgttcgtaaataataaccgagttgagtttatccttatatttgttaactatatccatggtgatacttgaaataatcggagaatgtttcccatttttaggattaacatagttgaataaatcctccatcacttcactaaatagtttttttgtttccttgtgtagatttgatacggctattctggcggctagaatggcataatccggatgttgtgtagtacaagtggctgctatttcggctgccagagtgtccaattctaccgttgttactccattatatattccttgaataaccttcatagctattttaataggatctatatgatccgtgtttaagccataacataattttctaatacgagacgtgattttatcaaacatgacattttccttgtatccatttcgtttaatgacaaacatttttgttggtgtaataaaaaaattatttaacttttcattaatagggatttgacgtatgtagcgtacaaaatgatcgttcctggtatatagataaagagtcctatatatttgaaaatcgttacggctcgattaaactttaatgattgcatagtgaatatatcattaggatttaactccttgactatcatggcggcgccagaaattaccatcaaaagcattaatacagttatgccgatcgcagttagaacggttatagcatccaccatttatatctaaaaattagatcaaagaatatgtgacaaagtcctagttgtatactgagaattgacgaaacaatgtttcttacatatttttttcttattagtaactgacttaatagtaggaactggaaagctagacttgattattctataagtatagatacccttccaaataatattctctttgataaaagttccagaaaatgtagaattttttaaaaagttatcttttgctattaccaagattgtgtttagacgcttattattaatatgagtgatgaaatccacaccgcctctagatatcgcctttatttccacattagatggtaaatccaatagtgaaactatctttttaggaatgtatggactcgcgtttagaggagtgaacgtcttgggcgtcggaaaggatgattcgtcaaacgaataaacaatttcacaaatggatgttaatgtattagtaggaaattttttgacgctagtggaattgaagattctaatggatgatgttctacctatttcatccgataacatgttaatttccgacaccaacggttttaatatttcgatgatatacggtagtctctctttcggacttatatagcttattccacaatacgagtcattatatactccaaaaaacaaaataactagtataaaatctgtatcgaatgggaaaaacgaaattatcgacataggtatagaatccggaacattgaacgtattaatacttaattctttttctgtggtaagtaccgataggttattgacattgtatggttttaaatattctataacttgagacttgatagatattagtgatgaattgaaaattatttttatcaccacgtgtgtttcaggatcatcgtcgacgcccgtcaaccaaccgaatggagtaaaataaatatcattaatatatgctctagatattagtatttttatcaatcctttgattatcatcttctcgtaggcgaatgattccatgatcaagagtgatttgagaacatcctccggagtattaatgggcttagtaaacagtccatcgttgcaataataaaagttatccaagttaaaggatattatgcattcgtttaaagatatcacctcatctgacggagacaattttttggtaggttttagagactttgaagctacttgtttaacaaagttattcatcgtcgtctactattctatttaattttgtagttaatttatcacatatcacattaattgactttttggtccatttttccatacgtttatattcttttaatcctgcgttatccgtttccgttatatccagggatagatcttgcaagttaaatagaatgctcttaaataatgtcattttcttatccgctaaaaatttaaagaatgtataaacctttttcagagatttgaaacttttaggtggagttctagtacacaatatcataaacaaactaataaacattccacattcagattccaacagctgattaacttccacattaatacagcctattttcgctccaaatgtacattcgaaaaatctgaataaaacatcgatgtcacaatttgtattatccaatacagaatgtttgtgattcgtgttaaaaccatcggagaaggaataaaaataaaaattattatagtggtggaattcagttggaatattgcctccggagtcataaaaggatactaaacattgttttttatcataaattacacatttccaatgagacaaataacaaaatccaaacattacaaatctagaggtagaacttttaattttgtctttaagtatatacgataagatatgtttattcataaacgcgtcaaatttttcatgaatcgctaaggagtttaagaatctcatgtcaaattgtcctatataatccacttcggatccataagcaaactgagagactaagttcttaatacttcgattgctcatccaggctcctctctcaggctctattttcatcttgacgacctttggattttcaccagtatgtattcctttacgtgataaatcatcgattttcaaatccatttgtgagaagtctatcgccttagatactttttcccgtagtcgaggtttaaaaaaatacgctaacggtatactagtaggtaactcaaagacatcatatatagaatggtaacgcgtctttaactcgtcggttaactctttcttttgatcgagttcgtcgctactattgggtctgctcaggtgccccgactctactagttccaacatcataccgataggaatacaagacactttgccggcggttgtagatttatcatatttctccactacatatccgttacaatttgttaaaaatttagatacatctatattgctacataatccagctagtgaatatatatgacataataaattggtaaatcctagttctggtattttactaattactaaatctgtatatctttccatttatcatggaaaagaatttaccagatatcttcttttttccaaactgcgttaatgtattctcttacaaatattcacaagatgaattcagtaatatgagtaaaacggaacgtgatagtttctcattggccgtgtttccagttataaaacatagatggcataacgcacacgttgtaaaacataaaggaatatacaaagttagtacagaagcacgtggaaaaaaagtatctcctccatcactaggaaaacccgcacacataaacctaaccgcgaagcaatatatatacagtgaacacacaataagctttgaatgttatagttttctaaaatgtataacaaatacagaaatcaattcgttcgatgagtatatattaagaggactattagaagctggtaatagtttacagatattttccaattccgtaggtaaacgaacagatactataggtgtactagggaataagtatccatttagcaaaattccattggcctcattaactcctaaagcacaacgagagatattttcagcgtggatttctcatagacctgtagttttaactggaggaactggagtgggtaagacgtcacaggtacccaagttattgctttggtttaattatttatttggtggattctctactctagataaaatcactgactttcacgaaagaccagtcattctatctcttcctaggatagctttagttagattgcatagcaataccattttaaaatcattgggatttaaggtactagatggatctcctatttctttacggtacggatctataccggaagaattaataaacaaacaaccaaaaaaatatggaattgtattttctacccataagttatctctaacaaaactatttagttatggcactcttattatagacgaagttcatgagcatgatcaaataggagatattattatagcagtagcgagaaagcatcatacgaaaatagattctatgtttttaatgactgccacgttagaggatgacagggaacggctaaaagtatttttacctaatcccgcatttatacatattcctggagatacactgtttaaaattagcgaggtatttattcataataagataaatccatcttccagaatggcatacatagaagaagaaaagagaaatttagttactgctatacagatgtatactcctcctgatggatcatccggtatagtctttgtggcatccgttgcacagtgtcacgaatataaatcatatttagaaaaaagattaccgtatgatatgtatattattcatggtaaggtcttagatatagacgaaatattagaaaaagtgtattcatcacctaatgtatcgataattatttctactccttatttggaatccagcgttactatacgcaatgttacacacatttatgatatgggtagagtttttgtccccgctccttttggaggatcgcaacaatttatttctaaatctatgagagatcaacgaaaaggaagagtaggaagagttaatcctggtacatacgtctatttctatgatctgtcttatatgaagtctatacagcgaatagattcagaatttctacataattatatattgtacgctaataagtttaatctaacactccccgaagatttgtttataatccctacaaatttggatattctatggcgtacaaaggaatatatagactcgttcgatattagtacagaaacatggaataaattattatccaattattatatgaagatgatagagtatgctaaactttatgtactaagtcctattctcgctgaggagttggataactttgagaggacgggagaattaactagtattgtacaagaagccattttatctctaaatttacaaattaagattttaaattttaaacataaagatgatgatacgtatatacacttttgtaaaatattattcggtgtctataacggaacaaacgctactatatattatcatagacctctaacgggatatatgaatatgatttcagatactatatttgttcctgtagataataactaaaaattaaactctaatgaccacatctttttttagagatgaaaaattttccacatctccttttgtagacacgactaaacattttgcagaaaaaagtttattagtgtttagataatcgtatacttcatcagtgtagatagtaaatgtgaacagataaaaggtattcttgctcaatagattggtaaattccatagaatatattaatcctttcttcttgagatcccacatcatttcaaccagagacgttttatccaatgatttacctcgtactataccacatacaaaactagattttgcagtgacgtcgtacctggtattcctaccaaacaaaattttacttttagttcttttagaaaattctaaggtagaatctctatttgccaatatgtcatctatggaattaccactagcaaaaaatgatagaaatatatattgatacatcgcagctggttttgatctactatactttaaaaacgaatcagattccataattgcctgtatatcatcagctgaaaaactatgttttacacgtattccttcggcatttctttttaatgatatatcttgtttagacaatgataaagttatcatgtccatgagagacgcgtctccgtatcgtataaatatttcattagatgttagacgcttcattaggggtatacttctataaggtttcttaatcagtccatcattggttgcgtcaagaactactatcggatgttgttgggtatctctagtgttacacatggccttactaaagtttgggtaaataactatgatatctctattaattatagatgcatatatttcattcgtcaaggatattagtatcgacttgctatcgtcattaatacgtgtaatgtaatcatataaatcatgcgatagccaaggaaaatttaaatagatgttcatcatataatcgtcgctataattcatattaatacgttgacattgactaatttgtaatatagcctcgccacgaagaaagctctcgtattcagtttcatcgataaaggataccgttaaatataactggttgccgatagtctcatagtctattaagtggtaagtttcgtacaaatacagaatccctaaaatattatctaatgttggattaatctttaccataactgtataaaatggagacggagtcataactattttaccgtttgtacttactggaatagatgaaggaataatctccggacatgctggtaaagacccaaatgtctgtttgaagaaatccaatgttccaggtcctaatctcttaacaaaaattacgatattcgatcccgatatcctttgcattctatttaccagcatatcacgaactatattaagattatctatcatgtctattctcccaccgttatataaatcgcctccgctaagaaacgttagtatatccatacaatggaatacttcatttctaaaatagtattcgttttctaattctttaatgtgaaatcgtatactagaaagggaaaaattatctttgagttttccgttagaaaagaaccacgaaactaatgttctgattgcgtccgattccgttgctgaattaatggatttacaccaaaaactcatataacttctagatgtagaagcattcgctaaaaaattagtagaatcaaaggatataagtagatgttccaacaagtgagcaattcccaagatttcatctatatcattctcgaatccgaaattagaaattcccaagtagatatcctttttcatccgatcgttgatgaaaatacgaactttattcggtaagacaatcatttactaaggagtaaaataggaagtaatgttcgtatgtcgttatcatcgtataaattaaaggtgtgttttttaccattaagtgacattataattttaccaatattggaattataatataggtgtatttgcgcactcgcgacggttgatgcatcggtaaatatagctgtatctaatgttctagtcggtatttcatcatttcgctgtctaataatagcgttttctctatctgtttccattacagctgcctgaagtttattggtcggataatatgtaaaataataagaaatacatacgaataacaaaaataaaataagatataataaagatgccatttagagatctaattttgtttaacttgtccaaattcctacttacagaagatgaggaatcgttggagatagtgtcttccttatgtagaggatttgaaatatcttataatgacttgataacttactttccagataggaaataccataaatatatttataaagtatttgaacatgtagatttatcggaggaattaagtatggaattccatgatacaactctgagagatttagtctatcttagattgtacaagtattccaagtgtatacggccgtgttataaattaggagataatctaaaaggcatagttgttataaaggacaggaatatttatattagggaagcaaatgatgacttgatagaatatctcctcaaggaatacactcctcagatttatacatattctaatgagcgcgtccccataactggttcaaaattaattctttgtggattttctcaagttacatttatggcgtatacaacgtcgcatataacaacaaataaaaaggtagatgttctcgtttccaaaaaatgtatagatgaactagtcgatccaataaattatcaaatacttcaaaatttatttgataaaggaagcggaacaataaacaaaatactcaggaagatattttattcggtaacaggtggccaaactccataggtagctttttctatttcggattttagaatttccaaattcaccagcgatttatcggttttggtgaaatccaaggatttattaatgtccacaaatgccatttgttttgtctgtggattgtatttgaaaatggaaacgatgtagttagatagatgcgctgcaaagtttcctattagggttccgcgctttacgtcacccagcatacttgaatcaccatcctttaaaaaaaatgataagatatcaacatggagtatatcatactcggattttaattcttctactgactcactgacattttcacaaatactacaatacggtttaccgaaaataatcagtacgttcttcatttatgggtatcaaaaacttaaaatcgttactgctggaaaataaatcactgacgatattagatgataatttatacaaagtatacaatggaatatttgtggatacaatgagtatttatatagccgtcgccaattgtgtcagaaacttagaagagttaactacggtattcataaaatacgtaaacggatgggtaaaaaagggagggcatgtaaccctttttatcgatagaggaagtataaaaattaaacaagacgttagagacaagagacgtaaatattctaaattaaccaaggacagaaaaatgttagaattagaaaagtgtacatccgaaatacaaaatgttaccggatttatggaagaagaaataaaggcagaaatgcaattaaaaatcgataaactcacatttcaaatatatttatctgattctgataacataaaaatatcattgaatgagatactaacacatttcaacaataatgagaatgttacattattttattgtgatgaacgagacgcagaattcgttatgtgtctcgaggctaaaacacatttctctaccacaggagaatggccgttgataataagtaccgatcaggatactatgctatttgcatctactgataatcatcctaagatgataaaaaacttaactcaactgtttaaatatgttccctctgcagaggataactatttagcaaaattaacggcgttagtgaatggatgtgatttctttcctggactctatggggcatctataacacccaccaacttaaacaaaatacaattgtttagtgattttacaatcgataatatagtcactagtttggcaattaaaaattattatagaaagactaactctaccgtagacgtgcgtaatattgttacgtttataaacgattacgctaatttagacgatgtctactcgtatattcctccttgtcaatgcactgttcaagaatttatattttccgcattagatgaaaaatggaatgaatttaaatcatcttatttagagaccgttccgttaccctgtcaattaatgtacgcgttagaaccacgtaaggagattgatgtttcagaagttaaaactttatcatcttatatagatttcgaaaatactaaatcagatatcgatgttataaaatctatatcctcgatcttcggatattctaacgaaaactgtaacacgatagtattcggcatctataaggataatttactactgagtataaataattcattttactttaacgatagtctgttaataaccaatactaaaagtgataatataataaatataggttactagattaaaaatggtgttccaactcgtgtgctctacgtgcggcaaagatatttctcacgaacgatataaattgattatacgaaaaaaatcattaaaggatgtactcgtcagtgtaaagaacgaatgttgtaggttaaaattatctacacaaatagaacctcaacgtaacttaacagtgcaacctctattggatataaactaatatggatccggttaattttatcaagacatatgcgcctagaggttctattatttttattaattataccatgtcattaacaagtcatttgaatccatcgatagaaaaacatgtgggtatttattatggtacgttattatcggaacacttggtagttgaatcaacatatagaaaaggagttcgaatagtcccattggatagtttttttgaaggatatcttagtgcaaaagtatacatgttagagaatattcaagttatgaaaatagcagctgatacgtcattaactttattgggtattccgtatggatttggtcataatagaatgtattgttttaaattggtagctgactgttataaaaatgccggtattgatacatcgtctaaacgaatattaggtaaagatatttttctgagccaaaacttcacagacgataatagatggataaagatatatgattctaataatttaacattttggcaaattgattaccttaaagggtgagttaatatgcataactactcctccgttgttttttccctcgttctttttcttaacgttgtttgccatcactctcataatgtaaagatattctaaaatggtaaacttttgcatatcggacgcagaaattggtataaatgttgtaattgtattatttcccgtcaatggactagtcacagctccatcagttttatatcctttagagtatttctcactcgtgtctagcattctagagcattccatgatctgtttatcgttgatattggccggaaagatagattttttattttttattatattactattggcaattgtagatataacttctggtaaatatttttctaccttttcaatctcttctattttcaagccggctatatattctgctatattgttgctagtatcaataccttttcttgctaagaagtcatatgtggtattcactatatcagttttaactggtagttccattagcctttccacttctgcagaataatcagaaattggttctttaccagaaaatccagctactataataggctcaccgatgatcattggcaaaatcctatattgtaccagattaatgagagcatatttcatttccaataattctgctagttcttgagacattgatttatttgatgaatctagttggttctctagatactctaccatttctgccgcatacaataacttgttagataaaatcagggttatcaaagtgtttagcgtggctagaatagtgggcttgcatgtattaaagaatgcggtagtatgagtaaaccgttttaacgaattatatagtctccagaaatctgtggcgttacatacatgagccgaatgacatcgaagattgtccaatatttttaatagctgctctttgtccattatttctatatttgactcgcaacaattgtagataccattaatcaccgattcctttttcgatgctggacaatagcacaattgtttagctttggactctatgtattcagaattaatagatatatctctcaatacagattgcactatacattttgaaactatgtcaaaaattgtagaacgacgctgttctgcagccatttaactttaaataatttacaaaaatttaaaatgagcatccgtataaaaatcgataaactgcgccaaattgtggcatatttttcagagttcagtgaagaagtgtctataaatgtagactcgacggatgagttaatgtatatttttgccgccttgggcggatctgtaaacatttgggcaattatacctctaagtgcatcagtgttttaccgaggagccgaaaatattgtgtttaatcttcctgtgtccaaggtaaaatcgtgtttgtgtagttttcacaatgatgccatcatagatatagaacctgatctggaaaataatctagtaaaactttctagttatcatgtagtaagtgtcgattgtaacaaggaactgatgcctattaggacagatactactatttgtctaagtatagatcaaaagaaatcttacgtgtttaattttcacaagtatgaagaaaaatgttgtggtagaaccgtcattcatctagaatggttgttgggctttatcaagtgtattagtcagcatcagcatctggctattatgtttaaagatgacaatattattatgaagactcctggtaatactgatgcgttttccagggaatattctatgactgaatgttctcaagaactacaaaagttttctttcaaaatagctatctcgtctctcaacaaactacgaggattcaaaaagagagtcaatgtttttgaaactagaatcgtaatggataatgacgataacattttaggaatgttgttttcggatagagttcaatcctttaagatcaacatctttatggcgtttttagattaatactttcaatgagataaatatgggtggcggagtaagtgttgagctccctaaacgggatccgcctccgggagtacccactgatgagatgttattaaacgtggataaaatgcatgacgtgatagctcccgctaagcttttagaatatgtgcatataggaccactagcaaaagataaagaggataaagtaaagaaaagatatccagagtttagattagtcaacacaggacccggtggtctttcggcattgttaagacaatcgtataatggaaccgcacccaattgctgtcgcacttttaatcgtactcattattggaagaaggatggaaagatatcagataagtatgaagagggtgcagtattagaatcgtgttggccagacgttcacgacactggaaaatgcgatgttgatttattcgactggtgtcagggggatacgttcgatagaaacatatgccatcagtggatcggttcagcctttaataggagtaatagaactgtagagggtcaacaatcgttaataaatctgtataataagatgcaaacattatgtagtaaagatgctagtgtaccaatatgcgaatcatttttgcattatttacgcgcacacaatacagaagatagcaaagagatgatcgattatattctaagacaacagtctgcggactttaaacagaaatatatgagatgtagttatcccactagagataagttagaagagtcattaaaatatgcggaacctcgagaatgttgggatccagagtgttcgaatgccaatgttaatttcttactaacacgtaattataataatttaggactttgcaatattgtacgatgtaataccagcgtgaacaacttacagatggataaaacttcctcattaagattgtcatgtggattaagcaatagtgatagattttctactgttcccgtcaatagagcaaaagtagttcaacataatattaaacactcgttcgacctaaaattgcatttgatcagtttattatctctcttggtaatatggatactaattgtagctatttaaatgggtgccgcggcaagcatacagacgacggtgaatacactcagcgaacgtatctcgtctaaattagaacaagaagcgaacgctagtgctcaaacaaaatgtgatatagaaatcggaaatttttatatccgacaaaaccatggatgtaacctcactgttaaaaatatgtgctctgcggacgcggatgctcagttggatgctgtgttatcagccgctacagaaacatatagtggattaacaccggaacaaaaagcatacgtgccagctatgtttactgctgcgttaaacattcagacgagtgtaaacactgttgttagagattttgaaaattatgtgaaacagacttgtaattctagcgcggtcgtcgataacaaattaaagatacaaaacgtaatcatagatgaatgttacggagccccaggatctccaacaaatttggaatttattaatacaggatctagcaaaggaaattgtgccattaaagcgttgatgcaattgacgactaaggccactactcaaatagcacctagacaagttgctggtacaggagttcagttttatatgattgttatcggtgttataatattggcagcgttgtttatgtactatgccaagcgtatgttgttcacatccaccaatgataaaatcaaacttattttagccaataaggaaaacgtccattggactacttacatggacacattctttagaacttctccgatggttattgctaccacggatatgcaaaactgaaaatatattgataatattttaatagattaacatggaagttatcgctgatcgtctagacgatatagtgaaacaaaatatagcggatgaaaaatttgtagattttgttatacacggtctagagcatcaatgtcctgctatacttcgaccattaattaggttgtttattgatatactattatttgttatagtaatttatatttttacggtacgtctagtaagtagaaattatcaaatgttgttggtggtgctagtcatcacattaactattttttattactttatactataatagtactagactgacttctaacaaacatctcacctgccataaataaatgcttgatattaaagtcttctatttctaacactattccatctgtggaaaataatactctgacattatcgctaattgacacatcggtgagtgatatgcctataaagtaataatcttctttgggcacatataccagtgtaccaggttctaacaacctatttactggtgctcctgtagcatactttttctttaccttgagaatatccatcgtttgcttggtcaatagcgatatgtgattttttatcaaccactcaaaaaagtaattggagtgttcatatcctctacgggctattgtctcatggccgtgtatgaaatttaagtaacacgactgtggtagatttgttctatagagccgattgccgcaaatagatagaactaccaatatgtctgtacaaatgttaaacattaattgattaacagaaaaaacaatgttcgttctgggaatagaaaccagatcaaaacaaaattcgttagaatatatgccacgtttatacatggaatataaaataactacagtttgaaaaataacagtatcatttaaacatttaacttgcggggttaatctcacaactttactgtttttgaactgttcaaaatatagcatcgatccgtgagaaatacgtttagccgcctttaatagaggaaatcccaccgcctttctggatctcaccaacgacgatagttctgaccagcaactcatttcttcatcatccacctgttttaacatataataggcaggagatagatatccgtcattgcaatattccttctcgtaggcacacaatctaatattgataaaatctccattctcttctctgcatttattatcttgtctcggtggctgattaggctgtggtcttggtttaggctttggtatatcgttgttgaatctattttggtcattaaatctttcatttcttcctggtatatttttatcacctcgtttggttggatttttgtctatattatcgtttgtaacatcggtacgggtattcatttatcacaaaaaaaacttctctaaatgagtctactgctagaaaacctcatcgaagaagataccatattttttgcaggaagtatatctgagtatgatgatttacaaatggttattgccggcgcaaaatccaaatttccaagatctatgctttctatttttaatatagtacctagaacgatgtcaaaatatgagttggagttgattcataacgaaaatatcacaggagcaatgtttaccacaatgtataatataagaaacaatttgggtctaggagatgataaactaactattgaagccattgaaaactatttcttggatcctaacaatgaagttatgcctcttattattaataatacggatatgactgccgtcattcctaaaaaaagtggtaggagaaagaataagaacatggttatcttccgtcaaggatcatcacctatcttgtgcattttcgaaactcgtaaaaagattaatatttataaagaaaatatggaatccgcgtcgactgagtatacacctatcggagacaacaaggctttgatatctaaatatgcgggaattaatgtcctgaatgtgtattctccttccacatccataagattgaatgccatttacggattcaccaataaaaataaactagagaaacttagtactaataaggaactagaatcgtatagttctagccctcttcaagaacccattaggttaaatgattttctgggactattggaatgtgttaaaaagaatattcctctaacagatattccgacaaaggattgattactataaatggagaatgttcctaatgtatactttaatcctgtgtttatagagcccacgtttaaacattctttattaagtgtttataaacacagattaatagttttatttgaagtattcgttgtattcattctaatatatgtattttttagatctgaattaaatatgttcttcatgcctaaacgaaaaatacccgatcctattgatagattacgacgtgctaatctagcgtgtgaagacgataaattaatgatctatggattaccatggatgacaactcaaacatctgcgttatcaataaatagtaaaccgatagtgtataaagattgtgcaaagcttttgcgatcaataaatggatcacaaccagtatctcttaacgatgttcttcgcagatgatgattcattttttaagtatttggctagtcaagatgatgaatcttcattatctgatatattgcaaatcactcaatatctagactttctgttattattattgatccaatcaaaaaataaattagaagctgtgggtcattgttatgaatctctttcagaggaatacagacaattgacaaaattcacagactttcaagattttaaaaaactgtttaacaaggtccctattgttacagatggaagggtcaaacttaataaaggatatttgttcgactttgtgattagtttgatgcgattcaaaaaagaatcctctctagctaccaccgcaatagatcctgttagatacatagatcctcgtcgtgatatcgcattttctaacgtgatggatatattaaagtcgaataaagtgaacaataattaattctttattgtcatcatgaacggcggacatattcagttgataatcggccccatgttttcaggtaaaagtacagaattaattagacgagttagacgttatcaaatagctcaatataaatgcgtgactataaaatattctaacgataatagatacggaacgggactatggacgcatgataagaataattttgaagcattggaagcaactaaactatgtgatgtcttggaatcaattacagatttctccgtgataggtatcgatgaaggacagttctttccagacattgttgaattctgtgagcgtatggcaaacgaaggaaaaatagttatagtagccgcactcgatgggacatttcaacgtaaaccgtttaataatattttgaatcttattccattatctgaaatggtggtaaaactaactgctgtgtgtatgaaatgctttaaggaggcttccttttctaaacgattgggtgaggaaaccgagatagagataataggaggtaatgatatgtatcaatcggtgtgtagaaagtgttacatcgactcataatattatattttttatctaaaaaactaaaaataaacattgattaaattttaatataatacttaaaaatggatgttgtgtcgttagataaaccgtttatgtattttgaggaaattgataatgagttagattacgaaccagaaagtgcaaatgaggtcgcaaaaaaactaccgtatcaaggacagttaaaactattactaggagaattattttttcttagtaagttacagcgacacggtatattagatggtgccaccgtagtgtatataggatctgctcccggtacacatatacgttatttgagagatcatttctataatttaggagtgatcatcaaatggatgctaattgacggccgccatcatgatcctattttaaatggattgcgtgatgtgactctagtgactcggttcgttgatgaggaatatctacgatccatcaaaaaacaactgcatccttctaagattattttaatttctgatgtgagatccaaacgaggaggaaatgaacctagtacggcggatttactaagtaattacgctctacaaaatgtcatgattagtattttaaaccccgtggcatctagtcttaaatggagatgcccgtttccagatcaatggatcaaggacttttatatcccacacggtaataaaatgttacaaccttttgctccttcatattcagctgaaatgagattattaagtatttataccggtgagaacatgagactgactcgagttaccaaattagacgctgtaaattatgaaaaaaagatgtactaccttaataagatcgtccgtaacaaagtagttgttaactttgattatcctaatcaggaatatgactattttcacatgtactttatgctgaggaccgtgtactgcaataaaacatttcctactactaaagcaaaggtactatttctacaacaatctatatttcgtttcttaaatattccaacaacatcaactgaaaaagttagtcatgaaccaatacaacgtaaaatatctagcaaaaattctatgtctaaaaacagaaatagcaagagatccgtacgcggtaataaatagaaacgtactactgagatatactaccgatatagagtataatgatttagttactttaataaccgttagacataaaattgattctatgaaaactgtgtttcaggtatttaacgaatcatccataaattatactccggttgatgatgattatggagaaccaatcattataacatcgtatcttcaaaaaggtcataacaagtttcctgtaaattttctatacatagatgtggtaatatctgacttatttcctagctttgttagactagatactacagaaactaatatagttaatagtgtactacaaacaggcgatggtaaaaagactcttcgtcttcccaaaatgttagagacggaaatagttgtcaagattctctatcgccctaatataccattaaaaattgttagatttttccgcaataacatggtaactggagtagagatagccgatagatctgttatttcagtcgctgattaatcaattagtagagatgagataagaacattataataatcaataatatatcttatatcttatatcttatatcttatatcttgtttagaaaaatgctaatattaaaatagctaacgctagtaatccaatcggaagccatttgatatctataatagggtatctaatttcctgatttaaatagcggacagctatattctcggtagctactcgtttggaatcacaaacattatttacatctaatttactatctgtaatggaaacgtttcccaatgaaatggtacaatccgatacattgcattttgttatatttttttttaaagaggctggtaacaacgcatcgcttcgtttacatggctcgtaccaacaataatagggtaatcttgtatctattcctatccgtactatgcttttatcaggataaatacatttacatcgtatatcgtctttgttagcatcacagaatgcataaatttgttcgtccgtcatgataaaaatttaaagtgtaaatataactattatttttatagttgtaataaaaagggaaatttgattgtatactttcggttctttaaaagaaactgacttgataaaaatggctgtaatctctaaggttacgtatagtctatatgatcaaaaagagattaatgctacagatattatcattagtcatgttaaaaatgacgacgatatcggtaccgttaaagatggtagactaggtgctatggatggggcattatgtaagacttgtgggaaaacggaattggaatgtttcggtcactggggtaaagtaagtatttataaaactcatatagttaagcctgaatttatttcagaaattattcgtttactgaatcatatatgtattcactgcggattattgcgttcacgagaaccgtattccgacgatattaacctaaaagagttatcgggacacgctcttaggagattaaaggataaaatattatccaagaaaaagtcatgttggaacagtgaatgtatgcaaccgtatcaaaaaattactttttcaaagaaaaaggtttgtttcgtcaacaagttggatgatattaacgttcctaattctctcatctatcaaaagttaatttctattcatgaaaagttttggccattattagaaattcatcaatatccagctaacttattttatacagactactttcccatccctccgttgattattagaccggctattagtttttggatagatagtatacccaaagagaccaatgaattaacttacttattaggtatgatcgttaagaattgtaacttgaatgctgatgaacaggttatccagaaggcggtaatagaatacgatgatattaaaattatttctaataacactaccagtatcaatttatcatatattacatccggcaaaaataatatgattagaagttatatcgtcgcccgacgaaaagatcagaccgctagatctgtaattggtcccagtacatctatcaccgttaatgaggtaggaatgcccgcatatattagaaatacacttacagaaaagatatttgttaatgcctttacagtggataaagttaaacaactattagcgtcaaaccaagttaaattttactttaataaacgattaaaccaattaacaagaatacgccaaggaaagtttattaaaaataaaatacatttattgcctggtgattgggtagaagtagctgttcaagaatatacaagtattatttttggaagacagccgtctctacatagatacaacgtcatcgcttcatctatcagagctaccgaaggagatactatcaaaatatctcccggaattgccaactctcaaaatgctgatttcgacggggatgaggaatggatgatattagaacaaaatcctaaagctgtaattgaacaaagtattcttatgtatccgacgacgttactcaaacacgatattcatggagcccccgtttatggatctattcaagatgaaatcgtagcagcgtattcattgtttaggatacaagatctttgtttagatgaagtattgaacatcttggggaaatatggaagagagttcgatcctaaaggtaaatgtaaattcagcggtaaagatatctatacttacttgataggtgaaaagattaattatccgggtctcttaaaggatggtgaaattattgcaaacgacgtagatagtaattttgttgtggctatgaggcatctgtcattggctggactcttatccgatcataagtcgaacgtggaaggtatcaactttattatcaagtcatcttatgtttttaagagatatctatctatttacggttttggggtgacattcaaagatctgagaccaaattcgacgttcactaataaattggaggccatcaacgtagaaaaaatagaacttatcaaagaagcatacgccaaatatctcaacgatgtaagagacgggaaaatagttccattatctaaagctttagaggcggactatgtggaatccatgttatccaacttgacaaatcttaatatccgagagatagaagaacatatgagacaaacgctgatagatgatccagataataacctcctgaaaatggccaaagcgggttataaagtaaatcccacagaactaatgtatattctaggtacgtatggacaacaaaggattgatggtgaaccagcagagactcgagtattgggtagagttttaccttactatcttccagactctaaggatccagaaggaagaggttatattcttaattctttaacaaaaggattaacgggttctcaatattacttttcgatgctggttgcaagatctcaatctactgatatcgtctgtgaaacatcacgtaccggaacactggctagaaaaatcattaaaaagatggaggatatggtggtcgacggatacggacaagtagttataggtaatacgctcatcaagtacgccgccaattataccaaaattctaggctcagtatgtaaacctgtagatcttatctatccagatgagtccatgacttggtatttggaaattagtgctctgtggaataaaataaaacagggattcgtttactctcagaaacagaaacttgcaaagaagacattggcgccgtttaatttcctagtattcgtcaaacccaccactgaggataatgctattaaggttaaggatctgtacgatatgattcataacgtcattgatgatgtgagagagaaatacttctttacggtatctaatatagattttatggagtatatattcttgacgcatcttaatccttctagaattagaattacaaaagaaacggctatcactatctttgaaaagttctatgaaaaactcaattatactctaggtggtggaactcctattggaattatttctgcacaggtattgtctgagaagtttacacaacaagccctgtccagttttcacactactgaaaaaagtggtgccgtcaaacaaaaacttggtttcaacgagtttaataacttgactaatttgagtaagaataagaccgaaattatcactctggtatccgatgatatctctaaacttcaatctgttaagattaatttcgaatttgtatgtttgggagaattaaatccagacatcactcttcgaaaagaaacagataggtatgtagtagatataatagtcaatagattatacatcaagagagcagaaataaccgaattagtcgtcgaatatatgattgaacgatttatctcctttagcgtcattgtaaaggaatggggtatggagacattcattgaggacgaggataatattagatttactgtctacctaaatttcgttgaaccggaagaattgaatcttagtaagtttatgatggttcttccgggtgccgccaacaagggaaagattagtaaattcaagattcctatctctgactatacgggttatgacgacttcaatcaaacaaaaaagctcaataagatgactgtagaactcatgaatctaaaagaattgggttctttcgatttggaaaacgtcaacgtgtatcctggagtatggaatacatacgatatcttcggtatcgaggccgctcgtgaatacttgtgcgaagccatgttaaacacctatggagaagggttcgattatctgtatcagccttgtgatcttctcgctagtttactatgtgctagttacgaaccagaatcagtgaataaattcaagttcggcgcagctagtactcttaagagagctacgttcggagacaataaagcattgttaaacgcggctcttcataaaaagtcagaacctattaacgataatagtagctgccacttttttagcaaggtccctaatataggaactggatattacaaatactttatcgacttgggtcttctcatgagaatggaaaggaaactatctgataagatatcttctcaaaagatcaaggaaatggaagaaacagaagacttttaattcttatcaataacatatttttctatgatctgtcttttaaacgatggattttccacaaatgcgcctctcaagtccctcatagaatgatacacgtataaaaaatatagcataggcgatgactccttatttttagacattagatatgccaaaatcatagccccgcttctatttactcccgcagcacaatgaaccaacacgggctcgtttcgttgatcacatttagataaaaaggcggttacgtcgtcaaaatatttactaatatcggtagttgtatcatctaccaacggtatatgaataatattaatattagagttaggtaatgtatatttatccatcgtcaaatttaaaacatatttgaacttaacttcagatgatggtgcatccatagcatttttataatttcccaaatacacattattggttacccttgtcattatagtgggagatttggctctgtgcatatctccagttgaacgtagtagtaagtatttatacaaacttttcttatccatttataacgtacaaatggataaaactactttatcggtaaacgcgtgtaatttagaatacgttagagaaaaggctatagtaggcgtacaagcagccaaaacatcaacacttatattctttgttattatattggcaattagtgcgctattactctggtttcagacgtctgataatccagtctttaatgaattaacgagatatatgcgaattaaaaatacggttaacgattggaaatcattaacggatagcaaaacaaaattagaaagtgatagaggtagacttctagccgctggtaaggatgatatattcgacttcaaatgtgtggatttcggcgcctattttatagctatgcgattggataagaaaacatatctgccgcaagctattaggcgaggtactggagacgcgtggatggttaaaaaggcggcaaaggtcgatccatctgctcaacaattttgtcagtatttgataaaacacaagtctaataatgttattacttgtggtaatgagatgttaaatgaattaggttatagcggttattttatgtcaccgcattggtgttccgattttagtaatatggaatagtgttagataaatgcggtaacgaatgttcctgtaaggaaccataacagcttagatttaacgttaaagatgagcataaacataataaacaaaattacaatcaaacctataacattaatatcaaacaatccaaaaaatgaaatcagtggagtagtaaacgcgtacataactcctggataacgtttagcagctgccgttcctattctagaccaaaaattcggtttcatgttttcgaaacggtattctgcaacaagtcgaggatcgtgttctacatatttggcggcgttatccagtatctgcctattgatcttcatttcgttttcgattctggctatttcaaaataaaatcccgatgatagacctccagactttataatttcatctacgatgttcagcgccgtagtaactctaataatataggctgataagctaacatcataccctcctgtatatgtgaatatggcatgatttttgtccattacaagctcggttttaactttattgcctgtaataatttctctcatctgtaggatatctatttttttgtcatgcattgccttcaagacgggacgaagaaacgtaatatcctcaataacgttatcgttttctacaataactacatattctacctttttattttctaactcggtaaaaaaattagaatcccatagggctaaatgtctagcgatatttcttttcgtttcttctgtacacatagtgttacaaaaccctgaaaagaagtgagtatacttgtcatcatttctaatgtttcctccagtccactgtataaacgcataatccttgtaatgatctggatcatccttgactaccacaacatttcttttttctggcataacttcgttgtcctttacatcatcgaacttctgatcattaatatgctcatgaacattaggaaatgtttctgatggaggtctatcaataactggcacaacaataacaggagttttcaccgccgccatttagttattgaaattaatcatatacaactctttaatacgagttatattttcgtctatccattgtttcacattgacatatttcgacaaaaagatataaaatgcgtattccaatgcttctctgtttaatgaattactaaaatatacaaacacgtcactgtctggcaataaatgatatcttagaatattgtaacaatttattttgtattgcacatgttcgtgatctatgagttcttcttcgaatggcataggatctccgaatctgaaaacgtataaataggagttagaataataatatttgagagtattggtaatatataaactctttagcggtataattagtttttttctctcaatttctatttttagatgtgatggaaaaatgactaattttgtagcattagtatcatgaactctaatcaaaatcttaatatcttcgtcacacgttagctctttgaagtttttaagagatgcatcagttggttctacagatggagtaggtgcaacaattttttgttctacacatgtatgtactggagccattgttttaactataatggtgcttgtatcgaaaaactttaatgcagatagcggaagctcttcgccgcgactttctacgtcgtaattgggttctaacgccgatctctgaatggatactagttttctaagttctaatgtgattctctgaaaatgtaaatccaattcctccggcattatagatgtgtatacatcggtaaataaaactatagtatccaacgatcccttctcgcaaattctagtcttaaccaaaaaatcgtatataaccacggagatggcgtatttaagagtggattcttctaccgttttgttcttggatgtcatataggaaactataaagtccgcactactgttaagaatgattactaacgcaactatatagtttaaattaagcattttggaaacataaaataactctgtagacgatacttgactttcgaataagtttgcagacaaacgaagaaagaacagacctctcttaatttcagaagaaaactttttttcgtattcctgacgtctagagtttatatcaataagaaagttaagaattagtcggttaatgttgtatttcattacccaagtttgagatttcataatattatcaaaagacatgataatattaaagataaagcgctgactatgaacgaaatagctatatggttcgctcaagaatatagtcttgttaaacgtggaaacgataactgtatttttaatcacgtcagcggcatctaaattaaatataggtatatttattccacacactctacaatatgccacaccatcttcataataaataaattcgttagcaaaattattaattttagtgaaatagttagcgtcaactttcatagcttccttcaatctaatttgatgctcacacggtgcgaattccactctaacatcccttttccatgcctcaggttcatcgatctctataatatctagttttttgcgtttcacaaacacaggctcgtctctcgcgatgagatctgtatagtaactatgtaaatgataactagatagaaagatgtagctatatagatgacgatcctttaagagaggtataataactttaccccaatcagatagactgttgttatggtcttcggaaaaagaatttttataaatttttccagtattttccaaatatacgtacttaacatctaaaaaatccttaatgataataggaatggataatccgtctattttataaagaaatacatatcgcacattatacttttttttggaaatgggaataccgatgtgtctacataaatatgcaaagtctaaatattttttagagaatcttagttggtccaaattcttttccaagtacggtaatagatttttcatattgaacggtatcttcttaatctctggttctagttccgcattaaatgatgaaactaagtcactatttttataactaacgattacatcacctctaacatcatcatttaccagaatactgatcttcttttgtcgtaaatacatgtctaatgtgttaaaaaaaagatcatacaagttatacgtcatttcatctgtggtattcttgtcattgaaggataaactcgtactaatctcttctttaacagcctgttcaaatttatatcctatatacgaaaaaatagcaaccagtgtttgatcatccgcgtcaatattctgttctatcgtagtgtataacaatcgtatatcttcttctgtgatagtcgatacgttataaaggttgataacgaaaatatttttatttcgtgaaataaagtcatcgtaggattttggacttatattcgcgtctagtagatatgcttttatttttggaatgatctcaattagaatagtctctttagagtccatttaaagttacaaacaactaggaaattggtttatgatgtataatttttttagtttttatagattctttattctatacttaaaaaatgaaaataaatacaaaggttcttgagggttgtgttaaattgaaagcgagaaataatcataaattatttcattatcgcgatatccgttaagtttgtatcgtaatggcgtggtcaattacgaataaagcggatactagtagcttcacaaagatggctgaaatcagagctcatctaaaaaatagcgctgaaaataaagataaaaacgaggatattttcccggaagatgtaataattccatctactaagcccaaaaccaaacgagccactactcctcgtaaaccagcggctactaaaagatcaaccaaaaaggaggaagtggaagaagaagtagttatagaggaatatcatcaaacaactgaaaaaaattctccatctcctggagtcagcgacattgtagaaagcgtggccgctgtagagctcgatgatagcgacggggatgatgaacctatggtacaagttgaagctggtaaagtaaatcatagtgctagaagcgatctctctgacctaaaggtggctaccgacaatatcgttaaagatcttaagaaaattattactagaatctctgcagtatcgacggttctagaggatgttcaagcagctggtatctctagacaatttacttctatgactaaagctattacaacactatctgatctagtcaccgagggaaaatctaaagttgttcgtaaaaaagttaaaacttgtaagaagtaaatgcgtgcacttttttataaagatggtaaactctttaccgataataattttttaaatcctgtatcagacgataatccagcgtatgaggttttgcaacatgttaaaattcctactcatttaacagatgtagtagtatatgaacaaacgtgggaggaggcgttaactagattaatttttgtgggaagcgattcaaaaggacgtagacaatacttttacggaaaaatgcatgtacagaatcgcaacgctaaaagagatcgtatttttgttagagtatataacgttatgaaacgaattaattgttttataaacaaaaatataaagaaatcgtccacagattccaattatcagttggcggtttttatgttaatggaaactatgttttttattagatttggtaaaatgaaatatcttaaggagaatgaaacagtagggttattaacactaaaaaataaacacatagaaataagtcccgatgaaatagttatcaagtttgtaggaaaggacaaagtttcacatgaatttgttgttcataagtctaatagactatataaaccgctattgaaactgacggatgattctagtcccgaagaatttctgttcaacaaactaagtgaacgaaaggtatacgaatgtatcaaacagtttggtattagaatcaaggatctccgaacgtatggagtcaattatacgtttttatataatttttggacaaatgtaaagtccatatctcctcttccgtcaccaaaaaagttaatagcgttaactatcaaacaaactgctgaagtggtaggtcatactccatcaatttcaaaaagagcttatatggcaacgactattttagaaatggtaaaggataaaaattttttagatgtagtatctaaaactacgttcgatgaattcctatctatagtcgtagatcacgttaaatcatctacggatggatgatatagatctttacacaaataattacaagaccgataaatggaaatggataagcgtataaaatctctcgcaatgaccgctttctttggggagctaagcacattagatattatggcattgataatgtctatatttaaacgccatccaaacaataccattttttcagtggataaggatggtcagtttatgattgatttcgaatacgataattataaggcttctcaatatttggatctgaccctcactccgatatttggagatgaatgcaagactcacgcatcgagtatagccgaacaattggcgtgtgcggatattattaaagaggatattagcgaatacatcaaaactactccccgtcttaaacgatttataaaaaaataccgcaatagatcagatactcgtatcagtcgagatacagaaaagcttaaaatagctctagctaaaggcatagattacgaatatataaaagacgcttgttaataagtaaatgaaaaaaaactagtcgtttataataaaacacgatatggatgccaacgtagtatcatcttctactattgcgacgtatatagacgctttagcgaagaatgcttcagaattagaacagaggtctaccgcatacgaaataaataatgaattggaactagtatttattaagccgccattgattactttgacaaatgtagtgaatatctctacgattcaggaatcgtttattcgatttaccgttactaataaggaaggtgttaaaattagaactaagattccattatctaaggtacatggtctagatgtaaaaaatgtacagttagtagatgctatagataacatagtttgggaaaagaaatcattagtgacggaaaatcgtcttcacaaagaatgcttgttgagactatcgacagaggaacgtcatatatttttggattacaagaaatatggatcctctatccgactagaattagtcaatcttattcaagcaaaaacaaaaaactttacgatagactttaagctaaaatattttctaggatccggtgcccaatctaaaagttctttgttgcacgctattaatcatccaaagtcaaggcctaatacatctctggaaatagaattcacacctagagacaatgaaacagttccatatgatgaactaataaaggaattgacgactctctcgcgtcatatatttatggcttctccagagaatgtaattctttctccgcctattaacgcgcctataaaaacctttatgttgcctaaacaagatatagtaggtttggatctggaaaatctatatgccgtaactaagactgacggcattcctataactatcagagttacatcaaacgggttgtattgttattttacacatcttggttatattattagatatcctgttaagagaataatagattccgaagtagtagtctttggtgaggcagttaaggataagaactggaccgtatatctcattaagctaatagagcccgtgaatgctatcagtgatagactagaagaaagtaagtatgttgaatctaaactagtggatatttgtgatcggatagtattcaagtcaaagaaatacgaaggtccgtttactacaactagtgaagtcgtcgatatgttatctacatatttaccaaagcaaccagaaggtgttattctgttctattcaaagggacctaaatctaacattgattttaaaattaaaaaggaaaatactatagaccaaactgcaaatgtagtatttaggtacatgtccagtgaaccaattatctttggagaatcgtctatctttgtagagtataagaaatttagcaacgataaaggctttcctaaagaatatggttctggtaagattgtgttatataacggcgttaattatctaaataatatctattgtttggaatatattaatacacataatgaagtgggtattaagtccgtggttgtacctattaagtttatagcagaattcttagttaatggagaaatacttaaacctagaattgataaaaccatgaaatatattaactcagaagattattatggaaatcaacataatatcatagtcgaacatttaagagatcaaagcatcaaaataggagatatctttaacgaggataaactatcggatgtgggacatcaatacgccaataatgataaatttagattaaatccagaagttagttattttacgaataaacgaactagaggaccgttgggaattttatcaaactacgtcaagactcttcttatttctatgtattgttccaaaacatttttagacgattccaacaaacgaaaggtattggcgattgattttggaaacggtgctgacctggaaaaatacttttatggagagattgcgttattggtagcgacggatccggatgctgatgctatagctagaggaaatgaaagatacaacaaattaaactctggaattaaaaccaagtactacaaatttgactacattcaggaaactattcgatccgatacatttgtctctagtgtcagagaagtattctattttggaaagtttaatatcatcgactggcagtttgctatccattattcttttcatccgagacattatgctaccgtcatgaataacttatccgaactaactgcttctggaggcaaggtattaatcactaccatggacggagacaaattatcaaaattaacagataaaaagacttttataattcataagaatttacctagtagcgaaaactatatgtctgtagaaaaaatagctgatgatagaatagtggtatataatccatcaacaatgtctactccaatgactgaatacattatcaaaaagaacgatatagtcagagtgtttaacgaatacggatttgttcttgtagataacgttgatttcgctacaattatagaacgaagtaaaaagtttattaatggcgcatctacaatggaagatagaccgtctacaaaaaactttttcgaactaaatagaggagccattaaatgtgaaggtttagatgtcgaagacttacttagttactatgttgtttatgtcttttctaagcggtaaataataatatggtatgggttctgatatccccgttctaaatgcattaaataattccaatagagcgatttttgttcctataggaccttccaactgtggatactctgtattgttaatagatatattaatacttttgtcgggtaacagaggttctacgtcttctaaaaataaaagttttataacatctggcctgttcataaataaaaacttggcgattctatatatactcttattatcaaatctagccattgtcttatagatgtgagctactgtaggtgtaccatttgattttctttctaatactatatatttctctcgaagaagttcttgcacatcatctgggaataaaatactactgttgagtaaatcagttattttttttatatcgatattgatggacatttttatagttaaggataataagtatcccaaagtcgataacgacgataacgaagtatttatacttttaggaaatcacaatgactttatcagattaaaattaacaaaattaaaggagcatgtatttttttctgaatatattgtgactccagatacatatggatctttatgcgtcgaattaaatgggtctagttttcagcacggtggtagatatatagaggtggaggaatttatagatgctggaagacaagttagatggtgttctacatccaatcatatatctaaagatatacccgaagatatgcacactgataaatttgtcatttatgatatatacacttttgacgctttcaagaataaacgattggtattcgtacaggtacctccgtcgttaggagatgatagtcatttgactaatccgttattgtcaccgtattatcgtaattcagtagccagacaactggtcaataatatgatttttaatcaagattcatttttaaaatatttattagaacatctgattagaagccactatagagtttctaaacatataacaatagttagatacaaggataccgaagaattaaatctaacgagaatatgttataatagagataagtttaaggcgtttgtattcgcttggtttaacggcgtttcggaaaatgaaaaggtactagatacgtataaaaaggtatctaatttgatataatgaattcagtgactgtatcacacgcgccatatactattacttatcacgatgattgggaaccagtaatgagtcaattggtagagttttataacgaagtagctagttggctgctacgagacgagacgtcgcctattcctgataagttctttatacagttgaaacaaccgcttagaaataaacgagtatgtgtgtgcggtatagatccgtatccgaaagatggaactggtgtaccgttcgaatcaccaaattttacaaaaaaatcaattaaggagatagcttcatctatatctagattaaccggagtaattgattataaaggttataaccttaatataatagacggggttataccctggaattattacttaagttgtaaattaggagaaacaaaaagtcacgcgatctactgggataaaatttctaagttactgctgcagcatataactaaacacgttagtgttctttattgtttgggtaaaacagatttctcgaatatacgggccaagttagaatccccggtaactaccatagtcggatatcatccagcggctagagaccgccaattcgagaaagatagatcatttgaaattatcaacgttttactggaattagacaacaaggcacctataaattgggctcaagggtttatttattaatgctttagtgaaattttaacttgtgttctaaatggatgcggctattagaggtaatgatgttatctttgttcttaagactataggtgtcccgtcagcgtgcagacaaaatgaagatccaagatttgtagaagcatttaaatgcgacgagttagaaagatatattgagaataatccagaatgtacactattcgaaagtcttagggatgaggaagcatactctatagtcagaattttcatggatgtagatttagacgcgtgtctagacgaaatagattatttaacggccattcaagattttattatcgaggtgtcaaactgtgtagctagattcgcgtttacagaatgcggcgccattcatgaaaatgtaataaaatccatgagatctaatttttcattgactaagtctacaaatagagataaaacaagttttcatattatctttttagatacgtataccactatggatacattgatagctatgaaacgaacactattagaattaagtagatcatctgaaaatccactaaccagatcgatagacactgccgtatataggagaaaaacaactcttcgggttgtaggtactaggaaaaatccaaattgcgacactattcatgtaatgcaaccaccgcatgataatatagaagattacctattcacttacgtggatatgaacaacaatagttattacttttctctacaacaacgattggaggatttagttcctgataagttatgggaaccagggtttatttcattcgaagacgctataaaaagagtttcaaaaatattcattaattctataataaactttaatgatctcgatgaaaataattttacaacggtaccactggtcatagattacgtaacaccttgtgcattatgtaaaaaacgatcgcataaacatccgcatcaactatcgttggaaaatggtgctattagaatttacaaaactggtaatccacatagttgtaaagttaaaattgttccgttggatggtaataaactgtttaatattgcacaaagaattttagacactaactctgttttattaaccgaacgaggagaccatatagtttggattaataattcatggaaatttaacagcgaagaacccttgataacaaaactaattttgtcaataagacatcaactacctaaggaatattcaagcgaattactctgtccgaggaaacgaaagactgtagaagctaacatacgagacatgttagtagattcagtagagaccgatacctatccggataaacttccgtttaaaaatggtgtattggacctggtagacggaatgttttactctggagatgatgctaaaaaatatacgtgtactgtatcaaccggatttaaatttgacgatacaaagttcgtcgaagacagtccagaaatggaagagttaatgaatatcattaacgatatccaaccattaacggatgaaaataagaaaaatagagagctatatgaaaaaacattatctagttgtttatgcggtgctaccaaaggatgtttaacattcttttttggagaaactgcaactggaaagtcgacaaccaaacgtttgttaaagtctgctatcggtgacctgtttgttgagacgggtcaaacaattttaacagatgtattggataaaggacctaatccatttatcgctaacatgcatttgaaaagatctgtattctgtagcgaactacctgattttgcatgtagtgggtcaaagaaaatcagatctgataatattaaaaagttgacagaaccttgtgtcattggaagaccgtgtttctccaataaaattaataatagaaaccatgcgacaatcattatcgatactaattacaaacctgtttttgataggatagataacgcattaatgagaagaattgccgtcgtgcgattcagaacacacttttctcaaccttctggtagagaggctgctgaaaataatgacgcgtacgataaagtcaaactattagacgaggggttagatggtaaaatacaaaataatagatatagatttgcatttctatacttgttggtgaaatggtacagaaaatatcatgttcctattatgaaactatatcctacaccggaagagattcctgactttgcattctatctcaaaataggtactctgttagtatctagctctgtaaagcatattccattaatgacggacctctccaaaaagggatatatattgtacgataatgtggtcactcttccgttgactactttccaacagaaaatatccaagtattttaattctagactatttggacacgatatagagagcttcatcaatagacataagaaatttgccaatgttagtgatgaatatctgcaatatatattcatagaggatatttcatctccgtaaatatatgctcatatatttatagaagatatcacatatctaaatgaataccggaatcatagatttatttgataatcatgttgatagtataccaactatattacctcatcagttagctactctagattatctagttagaactatcatagatgagaacagaagcgtgttattgttccatattatgggatcaggtaaaacaataatcgctttgttgttcgccttggtagcttccagatttaaaaaggtttacattctagtgccgaacatcaacatcttaaaaattttcaattataatatgggtgtagctatgaacttgtttaatgacaaattcatagctgagaatatctttattcattccacaacaagtttttattctcttaattataacgataacgtcattaattataacggattatctcgctacaataactctatttttatcgttgatgaggcacataatatctttgggaataatactggagaacttatgaccgtgataaaaaataaaaacaagattccttttttactattgtctggatctcccattactaacacacctaatactctgggtcatattatagatttaatgtccgaagagacgatagattttggtgaaattattagtcgtggtaagaaagtaattcagacacttcttaacgaacgcggtgtgaatgtacttaaggatttgcttaaaggaagaatatcatattacgaaatgcctgataaagatctaccaacgataagatatcacggacgtaagtttctagatactagagtagtatattgtcacatgtctaaacttcaagagagagattatatgattactagacgacagctatgttatcatgaaatgtttgataaaaatatgtataacgtgtcaatggcagtattgggacaacttaatctgatgaataatttagatactttatttcaggaacaggataaggaattgtacccaaatctgaaaataaataatggcgtgttatacggagaagaattggtaacgttaaacattagttccaaatttaaatactttattaatcggatacagacactcaacggaaaacattttatatacttttctaattctacatatggcggattggtaattaaatatatcatgctcagtaatggatattctgaatataatggttctcagggaactaatccacatatgataaacggcaaaccaaaaacatttgctatcgttactagtaaaatgaaatcgtctttagaggatctattagatgtgtataattctcctgaaaacgatgatggtagtcaattgatgtttttgttttcgtcaaacattatgtccgaatcctatactctgaaagaggtaaggcatatttggtttatgactatcccagatactttttctcaatacaaccaaattcttggacgatctattagaaaattctcttacgccgatatttctgaaccagttaatgtatatcttttagccgccgtatattccgatttcaatgacgaagtgacgtcattaaacgattacacacaggatgaattaattaatgttttaccatttgacatcaaaaagctgttatatctaaaatttaagacgaaagaaacgaatagaatatactctattcttcaagagatgtctgaaacgtattctcttccaccacatccatcaattgtaaaagttttattgggagaattggtcagacaatttttttataataattctcgtattaagtataacgataccaagttacttaaaatggttacatcagttataaaaaataaagaagacgctaggaattacatagatgatattgtaaacggtcacttctttgtatcgaataaagtatttgataaatctcttttatacaaatacgaaaacgatattattacagtaccgtttagactttcctacgaaccatttgtttggggagttaactttcgtaaagaatataacgtggtatcttctccataaaactgatgagatatataaagaaataaatgtcgagctttgttaccaatggatacctttccgttacattggaacctcatgagctgacgttagacataaaaactaatattaggaatgccgtatataagacgtatctccatagagaaattagtggtaaaatggccaagaaaatagaaattcgtgaagacgtggaattacctctcggcgaaatagttaataattctgtagttataaacgttccgtgtgtaataacctacgcgtattatcacgttggggatatagtcagaggaacattaaacatcgaagatgaatcaaatgtaactattcaatgtggagatttaatctgtaaactaagtagagattcgggtactgtatcatttagcgattcaaagtactgcttttttcgaaatggtaatgcgtatgacaatggcagcgaagtcactgccgttctaatggaggctcaacaaggtatcgaatctagttttgtttttctcgcgaatatcgtcgactcataagaaagagaatagcggtaagtataaacacgaatactatggcaataattgcgaatgttttattctcttcgatatatttttgataatatgaaaaacatgtctctctcaaatcggacaaccatctcataaaatagttctcgcgcgctggagaggtagttgccgctcgtataatctccccagaataatatacttgcgtgtcgtcgttcaatttatacggatttctatagttctctgttatataatgcggttttccatcatgattagacgacgacaatagtgttctaaatttagatagttgatcagaatgaatgtttattggcgttggaaaaattatccatacagcgtctgcagagtggttgatagttgttcctagatatgtaaaataatccaacttactaggcagcaaattgtctagataaaatactgaatcaaacggtgcagacgtattggcggatctaatggaatccaattgattaactatcttttgaaaatatacatttttatgatccaatacttgtaagaatatagaaataatgataagtccatcatcgtgtttttttgcctcttcataagaactatattttttcttattccaatgaacaagattaatctctccagagtatttgtacacatctatcaagtgattggatccataatcgtcttcctttccccaatatatatgtagtgatgataacacatattcattggggagaaaccctccacttatatatcctcctttaaaattaatccttactagttttccagtgttctggatagtggttggtttcgactcattataatgtatgtctaacggcttcaatcgcgcgttagaaattgcttttttagtttctatattaataggagatagttgttgcggcatagtaaaaatgaaatgataactgtttaaaaatagctcttagtatgggaattacaatggatgaggaagtgatatttgaaactcctagagaattaatatctattaaacgaataaaagatattccaagatcaaaagacacgcatgtgtttgctgcgtgtataacaagtgacggatatccgttaataggagctagaagaacttcattcgcgttccaggcgatattatctcaacaaaattcagattctatctttagagtatccactaaactattacggtttatgtactacaatgaactaagagaaatctttagacggttgagaaaaggttctatcaacaatatcgatcctcactttgaagagttaatattattgggtggtaaactagataaaaaggaatctattaaagattgtttaagaagagaattaaaagaggaaagtgatgaacgtataacagtaaaagaatttggaaatgtaattctaaaacttacaacacgggataaattatttaataaagtatatataagttattgcatggcgtgttttattaatcaatcgttggaggatttatcgcatactagtatttacaatgtagaaattagaaagattaaatcattaaatgattgtattaacgacgataaatacgaatatctgtcttatatttataatatgctagttaatagtaaatgaacttttacagatctagtataattagtcagattattaagtataatagacgactagctaagtctattatttgcgaggatgactctcaaattattacactcacggcattcgttaaccaatgcctatggtgtcataaacgagtatccgtgtccgctattttattaactactgataacaaaatattagtatgtaacagacgagatagttttctctattctgaaataattagaactagaaacatgtttagaaagaaacgattatttctgaattattccaattatttgaacaaacaggaaagaagtatactatcgtcatttttttctctagatccagctactactgataatgatagaatagacgctatttatccgggtggcatacccaaaaggggtgagaatgttccagagtgtttatccagggaaattaaagaagaagttaatatagacaattcttttgtattcatagacactcggttttttattcatggcatcatagaagataccattattaataaattttttgaggtaatcttctttgtcggaagaatatctctaacgagtgatcaaatcattgatacatttaaaagtaatcatgaaatcaaggatctaatatttttagatccgaattcaggtaatggactccaatacgaaattgcaaaatatgctctagatactgcaaaacttaaatgttacggccatagaggatgttattacgaatcattaaaaaaattaactgaggatgattgattagaaaatataaattaatttaccatcgtgtatttttataacgggattgtccggcatatcatgtagatagttaccgtctacatcgtatactcgaccatctacgcctttaaatcctctatttattgacattaatctattagaattggaataccaaatattagtaccctcaattagtttattggtaatattttttttagacgatagatcgatggctcttgaaaccaaggttttccaaccggactcattgtcgatcggtgagaagtctttttcattagcatgaatccattctaatgatgtatgtttaaacactctaaacaattggacaaattcttttgatttgctttgaatgatttcaaataggtcttcgtctacagtaggcataccattagataatctagccattataaagtgcacgtttacatatctacgttctggaggagtaagaacgtgactattgagacgaatggctcttcctactatctgacgaagagacgcctcgttccatgtcatatctaaaatgaagatatcattaattgagaaaaaactaataccctcgcctccactagaagagaatacgcatgttttaatgcattctccgttagtgtttgattcttggttaaactcagccaccgccttgattctagtatcttttgttctagatgagaactctatattagagataccaaagactttgaaatatagtaataagatttctattcctgactgattaacaaatggttcaaagactagacatttaccatgggatgctaatattcccaaacatacatctataaatttgacgcttttctcttttaattcagtaaatagagagatatcagccgcactagcatcccctttcaatagttctccctttttaaaggtatctaatgcggatttagaaaactctctatctcttaatgaatttttaaaatcattatatagtgttgctatctcttgcgcgtattcgcccggatcacgattttgtctttcaggaaagctatcgaacgtaaacgtagtagccatacgtctcagaattctaaatgatgatatacctgtttttatttcagcgagtttagccttttgataaatttcttcttgctttttcgacatattaacgtatcgcattaatactgttttcttagcgaatgatgcagacccttctacgtcatcaaaaatagaaaactcgttattaactatatacgaacatagtcctcctagtttggagactaattctttttcatcgactagacgtttattctcaaatagtgattggtgttgtaaggatcctggtcgtagtaagttaaccaacatggtgaattcttgcacactattgacgataggtgtagccgataaacaaatcatcttatggttttttaacgcaatggtcttagataaaaaattatatactgaacgagtaggacggatcttaccatcttctttgattaatgatttagaaatgaagttatgacattcatcaatgatgacgcatattctactcttggaattaatagttttgatattagtaaaaaatttatttctaaaattttgatcatcgtaattaataaaaatacaatccttcgttatctctggagcgtatctgagtatagtgttcatccaaggatcttctatcaaagcctttttcaccaataagataatagcccaattcgtataaatatccttaagatgtttgagaatatatacagtagtcattgttttaccgacacccgtttcatggaacaataaaagagaatgcatactgtctaatcctaagaaaactcttgctacaaaatgttgataatccttgaggcgtactacgtccgaccccatcatttcaacgggcatattagtagttctgcgtaaggcataatcgatataggccgcgtgtgatttactcatttatgagtgataagtaataactatgttttaaaaatcacagcagtagtttaactagtcttctctgatgtttgttttcgatactttttgaatcagaagtcatactagaataaagcaacgagtgaacgtaatagagagcttcgtatactctattcgaaaactctaagaacttattaatgaattccgtatccactggattgtttaaaatactaaattgaacactgttcacatccttccaagaagaagacttagtgacggacttaacatgagacataaataaatccaaattttttttacaaacatcactagccaccataatggcgctatctttcaaccagctatcgcttacgcattttagcagtctaacatttttaaagagactacaatatattctcatagtatcgattacacctctaccgaataaagttggaagtttaataatacaatatttttcgtttacaaaatcaaataatggtcgaaacacgtcgaaggttaacatcttataatcgctaatgtatagattgttttcagtgagatgattattagatttaatagcatctcgttcacgtttgaacagtttattgcgtgcgctgaggtcggcaactacggcgtccgctttagtactcctcccataatactttacgctattaatctttaaaatttcatagactttatctagatcgctttctggtaacatgatatcatgtgtaaaaagttttaacatgtcggtcggcattctatttagatcattaactctagaaatctgaagaaagtaattagctccgtattccagactaggtaatgggcttttacctagagacagattaagttctggcaatgtttcataaaatggaagaaggacatgcgttccctcccggatattttttacaatttcatccatttacaactctatagtttgttttcattattattagttattatctcccataatcttggtaatacttaccccttgatcgtaagataccttatacaggtcattacatacaactaccaattgtttttgtacataatagattggatggttgacatccatggtggaataaactactcgaacagatagtttatctttccccctagatacattagccgtaatagttgtcggcctaaagaatatctttggtgtaaagttaaaagttagggttcttgttccattattgctttttgtcagtagttcattataaattctcgagatgggtccgttctctgaatatagaacatcatttccaaatctaacttctagtctagaaataatatcggtcttattcttaaaatctattcccttgatgaagggatcgttaatgaacaaatccttggcctttgattcggctgatctattatctccgttatagacgttacgttgactagtccaaagacttacaggaatagatgtatcgatgatgttgatactatgtgatatgtgagcaaagattgttctcttagtggcatcactatatgttccagtaatggcggaaaactttttagaaatgttatatataaaagaattttttcgtgttccaaacattagcagattagtatgaagataaacactcatattatcaggaacattatcaatttttacatacacatcagcatcttgaatagaaacgataccatcttctggaacctctacgatctcggcagactccggataaccagtcggtgggccatcgctaacaataactagatcatccaacaatctactcacatatgcatctatataatctttttcatcttgtgagtaccctggatacgaaataaatttattatccgtatttccataataaggtttagtataaacagagagagatgttgccgcatgaacttcagttacagtcgccgttggttggtttatttgacctattactctcctaggtttctctataaacgatggtttaatttgtacattcttaaccatatatccaataaagctcaattcaggaacataaacaaattctttgttgaacgtttcaaagtcgaacgaagagtcacgaataacgatatcggatactggattgaaggttaccgttacggtaatttttgaatcggatagtttaagactgctgaatgtatcttccacatcaaacggagttttaatataaacgtatactgtagatggttctttaatagtgtcattaggagttaggccaatagaaatatcattaagttcactagaatatccagagtgtttcaaagcaattgtattattgatacaattattatataattcttcgccctcaatttcccaaataacaccgttacacgaagagatagatacgtgattaatacatttatatccaacatatggtacgtaactgaatcttcccatacctttaacttctggaagttccaaactcagaaccaaatgattaagcgcagtaatatactgatccctaatttcgaagctagcgatagcctgattgtctggaccatcgtttgtcataactccggatagagaaatatattgcggcatatataaagttggaatttgactatcgactgcgaagacattagaccgtttaatagagtcatccccaccgatcaaagaattaatgatagtattattcattttctatttaaaatggaaaaagcttacaataaactccgtagagaaatatctataatttgtgagttttccttaaagtaacagcttccgtaaacgccgtctttatctcttagtaggtttattgtatttatgaccttttccttatcttcatagaatactaaaggcaacaaagaaatttttggttcttctctaagagctacgtgagacttaaccatagaagccaacgaatccctacatattttagaacagaaataccctacttcaccacccttgtatgtctcaatactaataggtctaaaaaccaaatcttgattacaaaaccaacacttatcaattacactatttgtcttaatagacacatctgccatagatttataatactttggtagtatacaagcgagtgcttcttctttagcgggcttaaagactgctttaggtgctgaaataaccacatctggaaggcttactcgcttagccatttaattacggaactatttttttatacttctaatgagcaagtagaaaacctctcatctacaaaaacgtactcgtgtccataatcctctaccatagttacacgttttttagatctcatatgtgctaaaaagttttcccatactaattggttactattatttttcgtataatttttaacagtttgaggttttagatttttagttacagaagtgatatcgaatattttatccaaaaagaatgaataattaattgtcttagaaggagtgttttcttggcaaaagaataccaagtgcttaaatatttctactacttcattaatcttttctgtactcagattcagtttctcatcttttacttgattgattatttcaaagactaacttataatcctttttatttattctctcgttagccttaagaaaactagatacaaaatttgcatctacatcatccgtggatatttgatttttttccatgatatccaagagttccgagataatttctccagaacattgatgagacaataatctccgcaatacatttctcaaatgaataagtttattagacacgtggaagtttgactttttttgtacctttgtacatttttgaaatacagactcgcaaaaaatacaatattcatatccttgttcagatactataccgttatgtctacaaccgctacataatcgtagattcatgttaacactctacgtatctcgtcgtccaatattttatataaaaacattttatttctagacgttgccagaaaatcctgtaatatttttagttttttgggctgtgaataaagtatcgccctaatatggttaccgtcctccgccaatatagtagttaaattatccgcacatgcagaagaacaccgcttaggcggattcagtacaatgttatatttttcgtaccaactcatttaaatatcataatctaaaatagttctgtaatatgtctagcgctaatatattgatcataatcctgtgcataaattaagatacaacaatgtctcgaaatcatcgacatggcttcttccatagttagaagatcgtcgtcaaagttagcaacgtgattcatcaacatttgctgttttgaggcagcaaatactgaaccgtcgccattcaaccattcataaaaaccatcgtctgaatccattgataatttcttgtactggtttttgagagctcgcatcaatctagcatttctagctcccggattgaaaacagaaagaggatcgtacatccagggtccattttctgtaaatagaatcgtataatgtcccttcaagaagatatcagacgatccacaatcaaagaattggtctccgagtttgtaacaaactgcggactttaacctatacatgataccgtttagcataatttctggtgatacgtcaatcggagtatcatctattagagatctaaagccggtgtaacattctccaccaaacatattcttattctgacgtcgttctacataaaacatcattgctccattaacgataacaggggaatgaacagcactacccatcacattagttcccaatggatcaatgtgtgtaactccagaacatcttccatagcctatgttaggaggagcgaacaccactcttccactattgccatcgaatgccatagaataaatatccttggaattgatagaaatcggactgtcggatgttgtgatcatcttcataggattaacaactatgtatggtgccgcctgaagtttcatatcgtaactgatgccgtttataggtctagccacagaaaccaacgtaggtctaaatccaactatagacaaaatagaagccaatatctgttcctcatctgtcataacttgagagcatccagtatgaataatcttcattagatggggatctaccgcatcatcatcgttacaataaaaaattcccattctaatgttcataattgcttttctaatcatggtatgcatgtttgctctctgaatctctgtggaaattagatctgatacacctgtaatcactatcggattatcctccgtaagacgattaaccaacaacatataattataagactttacttttctaaattcataaagttgctggattaggctataggtgtctccatgtacatacgcgttctcgagcgcaggaagtttaataccgaatagtgccatcagaataggatgaatatagtaattagtttctggttttctataaataaaagacaaatcttgtgaactagacatatcggtaaaatgcatggattggaatcgtgtagtcgacagaagaatatgatgattagatggagagtatattttatctaactctttgagttggtcaccgattctaggactagctcgagaatgaataagtactaaaggatgagtacatttcacagaaacactagcattgttcaatgtgctctttacatgggtaaggagttgaaatagctcgtttctatttgttctgacaatatttagtttattcataatgttaagcatatcctgaatagtaaagttagatgtgtcatacttgttagtagttagatatttagcaattgcattcccatcatttctcaatctcgtactccaatcatgtgtagatgctacttcgtcgatggaaaccatacaatcctttttgataggctgttgagattgatcatttcctgcacgtttaggtttggtacgttgatttctagcccctgcggatataaagtcatcgtctacaatttgggacaatgaattgcatacactacaagacaaagatttatcagaagtgtgaatatgatcttcatctaccaaagaaagagtttgattagtataactagattttagtcctgcgttagatgttaaaaaaacatcgctattgaccacggcttccattatttatattcgtagtttttactcgaaagcgtgattttaatatccaatcttattacttttggaatcgttcaaaacctttgactagttgtagaatttgatctattgccctacgcgtatactcccttgcatcatatacgttcgtcaccagatcgtttgtttcggcctgaagttggtgcatatctctttcaacattcgacatgagatccttaagggccatatcgtctagattttgttgagatgctgctcctggatttggattttgttgtgctgttgtacatactgtaccaccagtaggtgtaggagtacatacagtggccacaataggaggttgagaaagtgtaaccgttggagtagtacaagaaatacttccatccgattgttgtgtacatgtagttgttggtaacgtctgagaaggttgggtagatggcggcgtcgtcgttttttgatctttattaaatttagagataatatcctgaacagcattgctcggcgtcaacgctggaaggagtgaactcgccggcgcatcagtatcttcagacagccaatcaaaaagattagacatatcagatgatgtattagtttgttgtcgtggttttggtgtaggagcagtactactaggtagaagaataggagccgatgtagctgttggaaccggctgtggagttatatgaatagttggttgtagcggttggataggctgtctgctggcggccatcatattatctctagctagttgttctcgcaactgtctttgataatacgactcttgagactttagtcctatttcaatcgcttcatcctttttcgtatccggatccttttcttcagaataatagattgacgactttggtgtagaggattctgccagcctctgtgagaacttgttaaagaagtccatttaaggctttaaaattgaattgcgattataagattaaatggcagacacagacgatattatcgactatgaatccgatgatctcaccgaatacgaggatgatgaagaagaggaagaagatggagagtcactagaaactagtgatatagatcccaaatcttcttataagattgtagaatcagcatccactcatatagaagatgcgcattccaatcttaaacatatagggaatcatatatctgctcttaaacgacgctatactagacgtataagtctatttgaaatagcgggtataatagcagaaagctataacttgcttcaacgaggaagattacctctagtttcagaattttctgacgaaacgatgaagcaaaatatgctacatgtaattatacaagagatagaggagggttcttgtcctatagtcatcgaaaagaacggagaattgttgtcggtaaacgattttgacaaagatggtctaaaattccatctagactatattatcaaaatttggaaacttcaaaaacgatattagaatttatacgaatatcgttctctaaatgtcacaatcaagtctcgcatgttcagcaatttattgtcgtactttatatcgtgttcattaacgatatcttgcaaaatagtaatgattctatcttccttcgatagatattcttcagagattattgtcttatattctttcttgttatcagatatgaatttgataagactttgaacattattgatacccgtctgtttaattttttctacagatattttagttttggcagattctatcgtatctgtcaatagacatccaacatcgacattcgacgtcaattgtctataaatcaacgtataaattttagaaataacattagcgaattgttgtgcgttgatgtcgttattctgaaacagtatgattttaggtagcattttcttaacaaagagaacgtatttattgttactcagttgaacagatgatatatccagattactaacgcatctgattccgtataccaaactttcagaagaaatggtatacaattgtttgtattcattcaatgtctctttttcagaaattagtttagagtcgaatactgcaataattttcaagagatagttttcatcagataagattttatttagtgtagatatgataaaactattgttttgttggagaacttgatacgccgcgttctctgtagtcgacgctctcaaatgggaaacaatctccattatttttttggaatcggatactatatcttcggtatcttgacgcagtctagtatacatagagttaagagagattagagtttgtacattaagcaacatgtctctaaatgtggctacaaacttttcctttttcacatcatctagtttattatataccgatttcacaacggcaccagatttaaggaaccagaatgaaaaactctgataactacaatatttcatcatagttacgattttatcatcttctatagttggtgtaatagcgcatacctttttctccaagactggaaccaacgtcataaaaatgtttaaatcaaaatccatatcaacatctgatgcgctaagaccagtctcgcgttcaagattatctttactaatggtgacgaactcatcgtataaaactctaagtttgtccattatttatttacagatttagttgtttaatttatttgtgctcttccagagttgggatagtatttttctaacgtcggtattatattattaggatctacgttcatatgtatcataatattaatcatccacgttttgataaatctatctttagcttctgaaataacgtatttaaacaaaggagaaaaatatttagctacggcatcagacgcaataacattttttgtaaatgtaacgtatttagacgacagatcttcgttaaaaagttttccatctatgtagaatccatcggttgttaacaccattcccgcgtcagattgaataggagtttgaatagtttgttttggaaatagatccttcaataacttatagttgggtgggaaaaaatcgattttatcactagactctttcttttttactatcattacctcatgaactatttcttgaatgagtatatgtattttctttcctatatcggacgcgttcattggaaaatataccatgtcgttaactataagaatatttttatcctcgtttacaaactgaataatatcagatgtagttcgtaaacgaactatatcatcaccagcacaacatctaactatatgatatccactagtttcctttagccgtttattatcttgttccatattagcagtcattccatcatttaagaaggcgtcaaagataatagggagaaatgacattttggattctgttacgactttaccaaaattaaggatatacggacttactatctttttctcaacgtcaatttgatgaacacacgatgaaaatgtgcttctatgagattgatcatgtagaaaacaacaagggatacaatatttccgcatatcatgaaatatattaagaaatcccaccttattatatttccccaaaggatccatgcacgtaaacattatgccgttatcattaataaagacttctttctcatcggatctgtaaaagttgttactgatttttttcattccaggatctagataattaataatgatgggttttctattcttattctttgtattttggcatatcctagaccagtaaacagtttccactttggtaaaatcagcagacttttgaacgctattaaacatggcattaatggcaataactaaaaatgtaaaatatttttctatgttaggaatatggtttttcactttaatagatatatggtttttggccaaaatgatagatatttttttatccgaggatagtaaaatattattagtcgccgtctctataaaaatgaagctagtctcgatatccaattttattctagaattgataggagtcgccaaatgtaccttatacgttatatctcccttgatgcgttccatttgtgtatctatatcggacacaagatctgtaaatagttttacgttattaatcatcacggtatcgccgtcgctagataacgctaatgtaccatccaagtcccaaatggagagatttaactgttcatcgtttagaataaaatgattaccggtcatattaataaagtgttcatcgtatctagataacaacgacttataattaatgtccaagtcttgaactcgctgaatgatcttttttaacccagttagttttagattggtacgaaatatattgttaaactttgattctacagtaatgtccaaatctagttgtggaaatacttccatcaacattgtttcaaacttgataatattattatctacatcttcgtacgatccaaattccggaatagatgtatcgcacgctctggccacccagataaccaaaaagtcacacgctccaggatatacattgtataaaaagctatcgtttttaagtagggtttttttctgcgtgtatacgaagggattaaaaatagtattatcaacgtaactatattccaaattattcttatgagaatagataataatatcgtccttaatatctaacaaatttcctaaatatccctttaattgagtcattcgaagcgtcaatagaatatgtctcttaactatttccggctgttgtatatttaaatgacttcgtaaaaaataatatatgggcgacttctcatctatgtaatcatatggagtgagatatagggctcgttctacctcctgccccttacccacctgtaataccaattgcggacttactatatatcgcatatttatatcgtggggtaaagtgaaaatctactaccgatgatgtaagtcttacaatgttcgaaccagtaccagatcttaatttggaggcctccgtagaactaggggaggtaaatatagatcaaacaacacctatgataaaggagaatagcggttttatatcccgcagtagacgtctattcgcccatagatctaaggatgatgagagaaaactagcactacgattctttttacaaagactttattttttagatcatagagagattcattatttgttcagatgcgttgacgctgtaaaagacgtcactattaccaaaaaaaataacattatcgtggcgccttatatagcacttttaactatcgcatcaaaaggatgcaaacttacagaaacaatgattgaagcattctttccagaactatataatgaacatagtaagaaatttaaattcaactctcaagtatccatcatccaagaaaaactcggataccagtttggaaactatcacgtttatgattttgaaccgtattactctacagtagctctggctattcgagatgaacattcatctggcatttttaatatccgtcaagagagttatctggtaagttcattatctgaaataacatatagattttatctaattaatctaaaatctgatcttgttcaatggagtgctagtacgggcgctgtaattaatcaaatggtaaatactgtattgattacagtgtatgaaaagttacaactggtcatagaaaatgattcacaatttacatgttcattggctgtggaatcaaaacttccaataaaattacttaaagatagaaatgaattatttacaaaattcattaacgagttaaaaaagaccagttcattcaagataagcaaacgcgataaggatacgctactaaaatattttacttaggactggagttagaatttatagacgactcatttcgtttatcattgttactattattactattactatcattattagtgttggcattattagtattcttcttgtcatcttgttcagaaatatacagcaatgctatacctaatactaaatacattatcatgctcgcaatggctctaacaacaacgaaccaaaatgaatttggtcgtagcttttgttcacaaaaatacataaagaaatgtctacataaatctatggcgccattggctacttgaaatagcgccagtcctcctacagattttaatatagctgtataacatgacatttattcatcatcaaaagagacagagtcaccatctgtcatatttagattttttttcatgtgttcaaagtatcctctactcatttcattataatagtttatcatacttagaattttaggacggatcaatgagtaagacttgactagatcgtcagtagtaatttgtgcatcgtctattctgcatccgcttcgtcgaataatgtatagcatcgctttgagattctccatagctatcaagtctttatacaatgacatggaaatatctgtgaatactttatacttctccaacatcgatgccttaacatcatcgcctactttagcattgaaaatacgttctattgtgtagatggatgtagcaagatttttaaacaacaatgccatcttacacgatgattgcctcaagtctccaatcgtttgtttagaacgattagctacagagtccaatgcttggctgactagcatattattatctttagaaattgtattcttcaatgaggcgtttatcatatctgtgatttcgttagtcatattacagtctgactgggttgtaatgttatccaacatatcacctatggatacggtacacgtaccagcatttgtaataatcctatctaagatgttgtatggcattgcgcagaaaatatcttctcctgtaatatctccactctcgataaatctactcagattattcttaaatgccttattctctggagaaaagatatcagtgtccatcatttcattaatagtatacgcagaaaagataccacgagtatcaattctatccaagatacttatcggttccgagtcacagataatggtttcctctccttcgggagatcctgcatagaaatatctaggacaatagtttctatactgtctgtaactctgataatctctaaagtcactaactgataccatgaaattgagaagatcaaacgctgaagtaattaatttttctgcctcgtttttactacaactagttttcatcaatgtagtgacgatgtattgtttagttacttttggtctaatactgatgatagagatattattgcttcccataatggatcttctagtagtcaccttaaagcccattgatgcgaatagcagatagataaagtcttggtatgactcctttctaatatagtacggactacctttgtcacccaactttatacccacataagccataacaacctctttaatagccgtttcatgaggtttatcagccatgagcctgagtagttggaagaatctcatgaatcccgtctcagaaagtcctatatgcatgatagatttatctttcctgggaaactctcgtatagtcatagatgaaatactctttaaagtttctgaaataagattagtaacagtcttacctccgactactctaggtaacaaacaaactctaataggtgttttctctgcggagataatatcagaaaggatagagcaataagtagtattattgtgattataaagaccgaatacataacaggtagaatttataaacatcatgtcctgaaggtttttagacttgtattcctcgtaatccataccgtcccaaaacatggatttggtaactttgatagccgtagatctttgttccttcgccaacaggttaaagaaattaataaagaatttgttgtttctatttatgtccacaaattgcacgtttggaagcgccacggttacattcactgcagcattttgaggatcgcgagtatgaagtacgatgttattgtttactggtatatctggaaagaaatctaccagtctaggaataagagattgatatcgcatagaaatagtaaagtttataatctcatcatcgaagagcattttgttaccattgtaataaatatccactctgtcatatgtataaatgaagtactgttcaaacatgatgagatgtttatatgttggcatagtagtgagatcgacgtttggtaatggcaatgtattaagattaactccataatgtctagcagcatctgcgatgttataagcgtcgtcaaagcggggtcgatcttgtattgttatatattgtctaacacctataagattatcaaaatcttgtctgcttaatacaccgttaacaatttttgccttgaattcttttattggtgcattaataacatccttatagaggatgttaaacaaataagtgttatcaaagttaagatctggatatttcttttctgctagaacatccattgagtcggagccatctggtttaatataaccaccgataaatctagctctgtattctgtatccgtcaatctaatattaagaaggtgttgagtgaaaggtggaagatcgtaaaagctgtgagtattaatgataggattagtttccgaactaatgttaattggggtattaataatatctatatttccagcgttaagtgtaacattaaacagttttaattcacgtgacgtggtatcaattaaataattaatgcccaatttggatatagcagcctgaagctcatcttgtttagttacggatcctaatgagttattaagcaatatatcgaacggatgaacgaaggttgttttaagttggtcacatactttgtaatctagacatagatgcggaagaacggtagaaactatacgaaataaatattcagagtcctctaattgatcaagagtaactattgacttaataggcatcatttatttagtattaaatgacgaccgtaccagtgacggatatacaaaacgatttaattacagagttttcagaagataattatccatctaacaaaaattatgaaataactcttcgtcaaatgtctattctaactcacgttaacaacgtggtagatagagaacataatgccgccgtagtgtcatctccagaggaaatatcctcacaacttaatgaagatctatttccagatgatgattcaccggccactattatcgaacgagtacaacctcatactactattattgacgatactccacctcctacgtttcgtagagagttattaatatcggaacaacgtcaacaacgagaaaaaagatttaatattacagtatcgaaaaatgctgaagcaataatggaatctagatctatgataacttctatgccaacacaaacaccatccttgggagtagtttatgataaagataaaagaattcagatgttagaggatgaagtggttaatcttagaaatcaacgatctaatacaaaatcatctgataatttagataattttaccaaaatactatttggtaagactccgtacaaatcaacagaagttaataagcgtatagccatcgttaattatgcaaatttgaacgggtcccccttatcagtcgaggacttggatgtttgttcggaggatgaaatagatagaatctataaaacgattaaacaatatcacgaaagtagaaaacgaaaaattatcgtcactaacgtgattattattgtcataaacattatcgagcaggcattgctaaaactcggatttgaagaaatcaaaggactgagtaccgatatcacttcagaaattatcgatgtggagatcggagatgactgcgatgctgtagcatctaaactaggaatcggtaacagtccggttcttaatattgtattgtttatactcaagatattcgttaaacgaattaaaattatttaatttaatacattcccatatccagacaacaatcgtctggattaatctgttcctgtcgtctcataccggacgacatattaatctttttattagtgggcatctttttagatggtttctttttcccagcattaactgagtcgatacctagaagatcgtgattgatctctccgaccattccacgaacttctaattggccgtctctgacggtaccataaactattttaccagcattagtaacagcttggacaatctgaccatccatcgcattgtacgatgtagtagtaactgttgttctacgtctaggagcaccagaagtatttttggagcccttggatgttgatgtagaagaagacgaggattttgattttggtttacatgtaatacattttgaactctttgattttgtatcacatgcgccggcagtcacatctgtttgagaattaagattattgttgcctcctttgacggctgcatctccaccgatttgcgctagtagatttttaagctgtggtgtaatcttattaactgtttcgatataatcatcgtaactgcttctaacggctaaattttttttatccgccatttagaagctaaaaatatttttatttatgcagaagatttaactagattatacaatgaactaatatgatccttttccagattatttacaaacttggtattttttggttctggaggaggcgaatttaaattcggacttggattcggattttgtaagttcttgatcttattatacatcgagtataggatggcgacagtaactgctacacaaataccgatcaaaagaagaataccaatcatttattgacaataacttcactattgatcaagtatgcaatatatcatcttttcactaaataagtagtaataatgattcaacaatgtcgagatatatggacgataataatttagttcatggaaatatcgctatgattggtgtgaatgactccgctaactctgtggggtgcgcagtgctttccccacatagaataaattagcattccgactgtgataataataccaagtataaacgccataatactcaatactttccatgtacgagtgggactggtagacttactaaagtcaataaaggcgaagatacacgaaagaatcaaaagaatgattccagcgattagcacgccggaaaaataatttccaatcataagcatcatgtccatttaactaataaaaattttaaatcgccgaatgaacaaagtggaatataaaccatataaaaacaatagtttgtactgcaaaaataatatctatttttgttttcgaagatatggtaaaattaaatagtagtacacagcatgttataactaacagcagcaacggctcgtaattacttatcatttactagacgaaaaggtggtgggatattttcttgctcaaataatacgaatatatcacccatccattttatgcgatgtttatatactctaatctttaatagatctatagacgacgggtttaccaacaatatagattttatcgattcatctaatttaaacccttccttaaacgtgaatgatctattatctggcataacgatgaccctacctgatgaatcggacaatgtactgggccatgtagaataaattatcaacgaattatcgtctacgaacatttatatcatttgttttaattttaggacgcgaataaatggatataaaatagaaaataacagatattacaaccagtgttatggccgcgcccaaccaggtaggcagttttattttatcttttactacaggttctcctggatgtacgtcaccaacggcggacgtagttctagtacaattagacgtaagttccgcttgggaattttttaacgctaaagagttaacgttaatcgtgcacccaacgtatttacatctagttcgttgaacatcttgattataatataaccattttctatctctagattcgtcagtgcactcatgtaaccaacataccctaggtcctaaatatttatctccggaattagattttggataattcgcgcaccaacaatttctatttcctttatgatcgttacaaaagacgtataatgccgtatccccaaaagtaaaataatcaggacgaataattctaataaactcagaacaatatctcgcatccatatgtttggagcaaatatcggaataagtagacatagccggtttccgttttgcacgtaaccattctaaacaattggggtttccaggatcgtttctacaaaatccagtcatgaaatcgtcacaatgttctgtcttgtaattattattaaatatttttggacagtgtttggtatttgtcttagaacaacattttgccacgctatcactatcgcccaggagataatccttttttataaaatgacatcgttgcccggatgctatataatcagtagcgtgttttaaatccttaatatattcaggagttacctcgttctgataatagattaatgatccaggacgaaatttgaaagaactacatggttctccatgaattaatacatattgtttagcaaattcaggaactataaaactactacaatgatctatcgacataccatctatcaaacaaaacttgggtttaatttctcccggagatgtttcataatagtacgtataactttcttctgcaaacttaacagctctattatattcaggataattaaaacctaattccatatatttgtctcgtatatctgctattcctggtgctattttgattctattaagagtaacagctgcccccattcttaataatcgtcagtatttaaactgttaaatgttggtatatcaacatctaccttatttcccgcagtataaggtttgttgcaggtatactgttcaggaatggttacatttatacttcttctatagtcctgtctttcgatgttcatcacatatgcaaagaacagaataaacaaaataatgtaagaaataatattaaatatctgtgaattcgtaaatacattgattgccataataattacagcagctacaatacacacaatagacattcccacagtgttgccattacctccacgatacatttgagttactaagcaataggtaataactaagctagtaagaggcaatagaaaagatgagataaatatcatcaatatagagattagaggagggctatatagagccaagacgaacaaaatcaaaccgagtaacgttctaacatcattatttttgaagattcccaaataatcattcattcctccataatcgttttgcatcatacctccatctttaggcataaacgattgctgctgttcctctgtaaataaatctttatcaagcactccagcacccgcagagaagtcgtcaagcatattgtaatatcttaaataactcatttatatattaaaaaatgtcactattaaagatggagtataatctttatgccgaactaaaaaaaatgacttgtggtcaacccctaagtctttttaacgaagacggggatttcgtagaagttgaaccgggatcatcctttaagtttctgatacctaagggattttacgcctctccttccgtaaagacgagtctagtattcgagacattaacaacgaccgataataaaatcactagtatcaatccaacaaatgcgccaaagttatatcctcttcaacgcaaagtcgtatctgaagtagtttctaatatgaggaaaatgatcgaatcaaaacgtcctctatacattactcttcacttggcgtgtggatttggtaagactattaccacgtgttatcttatggctacacacggtagaaaaaccgtcatttgcgtacccaataaaatgttaatacatcaatggaagacacaggtagaggcagtcggattggaacataagatatccatagatggagtaagtagtctattaaaggaactaaagactcaaagtccggatgtattaatagtagtcagtagacatctgacaaacgatgccttttgtaaatatatcaataagcattatgatttgttcatcttggatgaatcacatacgtataatctgatgaacaatacagcagttacaagatttttagcgtattatcctccgatgatgtgttattttttaactgctacacctagaccatctaaccgaatttattgtaacagtattattaatattgccaagttatccaatctaaaaaaaactatctatgcagtagatagtttttttgagccatattccacagataatattagacatatggtaaaacgactagatggaccatctaataaatatcatatatataccgagaagttattatctgtagacgagcctagaaatcaacttattcttgataccctggtagaagaattcaagtcaggaactattaatcgcattttagttattactaaactacgtgaacatatggtattattctacaaacgattattagattttttcggaccagaggttgtatttataggagacgcccaaaatagacgtactccagatatggtcaaatcaatcaaggaactaaatagatttatattcgtatccaccttattttattccggtactggtttagatattcctagtttggattcgttgttcatttgctcggcagtaatcaacaatatgcaaatagagcaattactagggagggtatgtcgagaaacagaactattagataggacggtatatgtatttcctaacacatccatcaaagaaataaagtacatgataggaaatttcatgcaacgaattattagtctgtctgtagataaactaggatttaaacaaaaaagttatcggaaacatcaagaatccgatcccacttctgcatgtacaacatcatccagagaagaacgtgtattaaatagaatatttaactcgcaaaatcgttaagaagtttaagcgacgatccgcatgctgcgcaggccagtgtattacccctcatagtattaatataatccaatgatacttttgtgatgtcggaaatcttaaccaatttagactgacaggcagaacacgtcatgcaatcatcatcgtcatcgataactgtagtcttgggcttctttttgcgactcttcattccggaacgcacattggtgctatccatttaggtagtaaaaaataagtcagaatatgccctataacacgatcgtgcaaaacctggtatatcgtctctatctttatcacaatatagtgtatcgacatttttattattattgacctcgtttatcttggaacatggaatgggaacatttttgttatcaacggccatctttgccttaattccagatgttgtaaaattataactaaacagtctatcatcgacacaaatgaaattcttgtttagacgtttgtagtttacgtatgcggctcgttcgcgtctcattttttcagatattgcaggtactataatattaaaaataagaatgaaataacataggattaaaaataaagttatcatgacttctagcgctgatttaactaacttaaaagaattacttagtctgtacaaaagtttgagattttcagattctgcggctatagaaaagtataattctttggtagaatggggaacatctacttactggaaaataggcgtgcaaaaggtagctaatgtcgagacgtcaatatctgattattatgatgaggtaaaaaataaaccgtttaatattgatccgggctattacattttcttaccggtatattttgggagcgtctttatttattcgaagggtaaaaatatggtagaacttggatctggaaactcttttcaaataccagatgatatgcgaagtgcgtgtaacaaagtattagacagcgataacggaatagactttctgagatttgttttgttaaacaatagatggataatggaagatgctatatcaaaatatcagtctccagttaatatatttaaactagctagtgagtacggattaaacatacccaaatatttagaaattgaaatagaggaagacacattatttgacgacgagttatactctattatagaacgctctttcgatgataaatttccaaaaatatccatatcgtatattaagttgggagaacttagacggcaagttgtagactttttcaaattctcattcatgtatattgagtccatcaaggtagatcgtataggagataatatttttattcctagcgttataacaaaatcaggaaaaaagatattagtaaaagatgtagaccatttaatacgatccaaggttagagaacatacatttgtaaaagtaaaaaagaaaaacacattttccattttatacgactatgatggaaacggaacagaaactagaggagaagtaataaaacgaattatagacactataggacgagactattatgttaacggaaagtatttctctaaggttggtagtgcaggcttaaagcaattgactaataaattagatattaatgagtgcgcaactgtcgatgagttagttgatgagattaataaatccggaactgtaaaacgaaaaataaaaaaccaatcagcatttgatttaagcagagaatgtttgggatatccagaagcggattttataacgttagttaataacatgcggttcaaaatagaaaattgtaaggttgtaaatttcaatattgaaaatactaattgtttaaataacccgagtattgaaactatatatggaaactttaaccagttcgtctcaatctttaatgtcgtcaccgatgtcaaaaaaagattattcgagtgaaataatatgcgcctttgatataggtgcaaaaaatcctgccagaactgttttagaagtcaaggataactccgttagggtattggatatatcaaaattagactggagttctgattgggaaaggcgcatagctaaagatttgtcacaatatgaatacactacagttcttctagaacgtcagcctagaaggtcgccgtatgttaaatttatctattttattaaaggctttttatatcatacatcggctgccaaagttatttgcgtctcgcctgtcatgtctggtaattcatatagagatcgaaaaaagagatcggtcgaagcatttcttgattggatggacacattcggattgcgagactccgttccggatagacgcaaattagacgatgtagcggatagtttcaatttggctatgagatacgtattagataaatggaatactaattatacaccttataataggtgtaaatctagaaattacataaaaaaaatgtaataacgttagtaacgccattatggataatctatttacctttctacatgaaatagaagatagatatgccagaactatttttaactttcatctaataagttgcgatgaaataggagatatatatggtcttatgaaagaacgcatttcctcagaggatatgtttgataatatagtgtataataaagatatacatcctgccattaagaaactagtgtattgcgacatccaacttactaaacacattattaatcagaatacgtatccggtatttaacgattcttcacaagtgaaatgttgtcattatttcgacataaactcagataatagcaatattagctctcgtacagtagagatatttgagagggaaaagtcatctcttgtatcatatattaaaactaccaataagaagagaaaggtcaattacggcgaaataaagaaaactgttcatggaggcactaatgcaaattacttttccggtaaaaagtctgacgagtatctgagtactacagttagatccaacattaatcaaccttggatcaaaaccatctctaagaggatgagagttgatatcattaatcactctatagtaacgcgtggaaaaagctctatattacaaactatagaaattatttttactaatagaacatgtgtgaaaatattcaaggattctactatgcacattattctatccaaggacaaggatgaaaaggggtgtatacacatgattgacaaattattctatgtctattataatttatttctgttgttcgaagatatcatccaaaacgagtactttaaagaagtagctaatgttgtaaaccacgtactcacggctacggcattagatgagaaattattcctaattaagaaaatggctgaacacgatgtttatggagttagcaatttcaaaatagggatgtttaacctgacatttattaagtcgttggatcataccgttttcccctctctgttagatgaggatagcaaaataaagttttttaaggggaaaaagctcaatattgtagcattacgatctctggaggattgtataaattacgtgactaaatccgagaatatgatagaaatgatgaaggaaagatcgactattttaaatagcatagatatagaaacggaatcggtagatcgtctaaaagaattgcttctaaaatgaaaaaaaacactaattcagaaatggatcaacgactagggtataagtttttggtgcctgatcctaaagccggagttttttatagaccgttacatttccaatatgtatcgtattctaattttatattgcatcgattgcatgaaatcttgaccgtcaagcggccactcttatcgtttaagaataatacagaacgaattatgatagaaattagcaatgttaaagtgactcctccagattactcacctataatcgcgagtattaaaggtaagagttatgacgcattagccacgttcactgtaaatatctttaaagaggtaatgaccaaagagggtatatccatcactaaaataagtagttatgagggaaaagattctcatttgataaaaattccgctactaataggatacgggaataaaaatccacttgatacagccaagtatcttgttcctaatgtcataggtggagtctttatcaataaacaatctgtcgaaaaagtaggaattaatctagtagaaaagattacaacatggccaaaatttagggttgttaagccaaactcattcactttctcgttttcctccgtatcccctcctaatgtattaccgacaagatatcgccattacaagatatctctggatatatcacaattggaagcgttgaatatatcatcgacaaagacatttataacggtcaatattgttttgctgtctcaatatttatctagagtgagtctagaattcattagacgtagtttatcatacgatatgcctccagaagttgtctatctagtaaacgcgataatagatagtgctaaacgaattactgaatctattactgactttaatattgatacatacattaatgacctggtggaagctgaacacattaaacaaaaatctcagttaacgattaacgagttcaaatatgaaatgctgcataactttttacctcatatgaactatacacccgatcaactaaagggattttatatgatatctttactaagaaagtttctctactgtatcttccacacttctagatatccagatagagattcgatggtttgtcatcgcatcctaacgtacggcaaatattttgagacgttggcacatgatgaattagagaattacataggcaacatccgaaacgatatcatgaacaatcacaagaacagaggcacttacgcggtaaacattcatgtactaacaactcccggacttaatcacgcgttttctagcttattgagtggaaagttcaaaaagtcagacggtagttatcgaacacatcctcactattcatggatgcagaatatttctattcctaggagtgttggattttatccggatcaagtaaagatttcaaagatgttttctgtcagaaaataccatccaagtcaatatctttacttttgttcatcagacgttccggaaagaggtcctcaggtaggtttagtatctcaattgtctgtcttgagttccattacaaatatactaacgtctgagtatttggatttggaaaagaaaatttgtgagtatatcagatcatattataaagatgatataagttactttgaaacaggatttccaatcactatagaaaatgctctagtcgcatctcttaatccaaatatgatatgtgattttgtaactgactttagacgtagaaaacggatgggattcttcggtaacttggaggtaggtattactttagttagggatcacatgaatgaaattcgcattaatattggagcgggaagattagtcagaccattcttggttgtggataacggagagctcatgatggatgtgtgtccggagttagaaagcagattagacgacatgacattctctgacattcagaaagagtttccgcatgtcatcgaaatggtagatatagaacaatttacttttagtaacgtatgtgaatcggttcaaaaatttagaatgatgtcaaaggatgaaagaaagcaatacgatttatgtgactttcctgccgaatttagagatggatatgtagcatcttcactagtgggaatcaatcacaattctggacccagagctattcttggatgtgctcaagctaaacaagctatctcttgtctgagttcggatatacgaaataaaatagacaatggaattcatttgatgtatccagagaggccaatcgtgattagtaaggctttagaaacttcaaagattgcggctaattgcttcggccaacatgttactatagcattaatgtcgtacaaaggtatcaatcaagaggatggaattatcatcaaaaaacaatttattcagagaggcggtctcgatattgttacagccaagaaacatcaagtagaaattccattggaaaactttaataacaaagaaagagataggtctaacgcctattcaaaattagaaagtaatggattagttagactgaatgctttcttggaatccggagacgctatggcacgaaatatctcatcaagaactcttgaagatgattttgctagagataatcagattagcttcgatgtttccgagaaatataccgatatgtacaaatctcgcgttgaacgagtacaagtagaacttactgacaaagttaaggtacgagtattaaccatgaaagaaagaagacccattctaggagacaaatttaccactagaacgagtcaaaagggaacagtcgcgtatgtcgcggatgaaacggaacttccatacgacgaaaatggtatcacaccagatgtcattattaattctacatccatcttctctagaaaaactatatctatgttgatagaagttattttaacagccgcatattctgctaagccgtacaacaataagggagaaaaccgacctgtctgttttcctagtagtaacgaaacatccatcgatacatatatgcaattcgctaaacaatgttatgagcattcaaatccgaaattgtccgatgaagaattatcggataaaatcttttgtgaaaagattctctatgatcctgaaacggataagccttatgcatccaaagtattttttggaccaatttattacttgcgtctgaggcatttaactcaggacaaggcaaccgttagatgtagaggtaaaaagacgaagctcattagacaggcgaatgagggacgaaaacgtggaggaggtatcaagttcggagaaatggagagagactgtttaatagcgcatggtgcagccaatactattacagaagttttgaaagattcggaagaagattatcaagatgtgtatgtttgtgaaaattgtggagacatagcagcacaaatcaagggtattaatacatgtcttagatgttcaaaacttaatctctctcctctcttaacaaaaattgataccacgcacgtatctaaagtatttcttactcaaatgaacgccagaggcgtaaaagtcaaattagatttcgaacgaaggcctccttcgttttataaaccattagataaagttgatctcaagccgtcttttctggtgtaatattctagtttggtagtagatacatatcaatatcatcaaattcgagatccgaattataaaatgggcgtggattgttaactatagaatcggacgtctgatattcgaaaatctgtggagtttcaggttttggtggaggtgtaactgctacttgggatactgaagtctgatattcagaaagctgtggatgttctggttcggcatccaccgatggtgtcacatcactaatcggttcggtaacgtctgtggatggaggtgctacttctacagaacctgtagcctcagttgtcaacggagatacatttttaatgcgagaaaatgtataatttggtaatggtttcttatgtggatctgaagaagaggtaagatatctactagaaagataccgatcacgttctagttctcttttgtagaacttaactttttctttctccgcatctagttgatattccaacctcttcacgttactacgttcagattccaattcacgttcgcatgggttacctccgcagtttttacgagcgatttcacgttcagccttcatgcgtctctccctctctctatcgagtttatcagagcagtctttctgaaggcgatcgaactccataaatttctccaacgctttgattgtttccatagatttccgaagttcagcttttaggactgtgattctttttctttcgaattcacagctggatgtacaaccgtttccattaccgccatctctaagtttcttttctagatcggcaacatttcatccccatgccttttacattcctcgagtctactgtcgtcgaaatatcgttccagctccttttcgacatcaataactttagcacgttgtctctcaagctctcttttgtagttatctgattccctggcacgtttaagatcttcatgcaattgagtcagctcttaacttcctctcttgcttcttcgtcatagtacgcgcaatcactgtgagatccattgttaccacgtctacactcggcgagctcgcgtttaagagattcaatttcccgtttgtattggtccatgtttccattgctaccaccattagatttacaggctgctagttgtcgttcgagatcagaaatacgggttttcttggaattgatttcgtcgatgtacttggcatcgaaacacttattaagttctttttccaattctacgattttatttctttcgcgagtcaattccctcctgtagtaactatctgttttgtcagattcacgctctctacgtagactttcttgcaagttactaatttgttccctagcacgtccgagtttagttttatatgctgaatagagttctgattcatcctttgagcagatctctagcgatcgtttaagattcctaattctagtctttagcctatttacctcctcagaagatgttccgttaccgttgcgtttacactcgttaagctgtctatcaagatccatgattctatctctaagacgttgcatctctctttccatatcagcattgctttcattattacgtctgcagtcactcaactgtctttcaatatctgagattctatctctaagacgtcgcatctctctctgtttcggcattggtttcattattacgtttacagtcgttcaactgtctttcaagatctgatattctagattggagtctgctaatctctgtagcattttcacggcattcactcagttgtctttcaagatctgaaattttagattggagtctgctaatctctgtaagatttcctcctccgctctcgatgcagtcggtcaacttattctctagttctctaatacgcgaacgcagtgcatcaacttcttgcgtgtcttcctggttgcgtgtacattcatcgagtctagattcgagatctctaacgcgtcgtcgttcttcctcaagttctctgcgtactacagaaagcgtgtccttatcttgttgatatttagcaatttctgattctagagtactgattttgcttacgtagttactaatatttgtcttggccttatcaagatcctccttgtatttgtcgcattccttgatatccctacgaagtctggacagttcccattcgacattacgacgtttatcgatttcagctcggagatcgtcatcgcgttgttttagccacatacgactgagttcaagttctcgttgacaagatccatctacttttccattcctaatagtatccagttccttttctagttctgaacgcatttctcgttccctatcaagcgattctctcaattctcggatagtcttcttatcaatttctaataaatctgaaccatcatctgtcccattttgaatatccctgtgttctttgatctcttttgtaagtcggtcgattctttcggttttataaacagaatccctttccaaagtcctaatcttactgagtttatcactaagttctgcattcaattcggtgagttttctcttggcttcttccaactctgttttaaactctccactatttccgcattcttcctcgcatttatctaaccattcaattagtttattaataactagttggtaatcagcgattcctatagccgttcttgtaattgtgggaacataattaggatcttctaatggattgtatggcttgatagcatcatctttatcattattagggggatggacaaccttaattggttggtcctcatctcctccagtagcgtgtggttcttcaataccagtgttagtaataggcttaggcaaatgcttgtcgtacgcgggcacttcctcatccatcaagtatttataatcgggttctacttcagaatattcttttctaagagacgcgacttcgggagttagtagaagaactctgtttctgtatctatcaacgctggaatcaatactcaagttaaggatagcgaatacctcatcgtcatcatccgtatcttctgaaacaccatcatatgacatttcatgaagtctaacgtattgataaatagaatcagatttagtattaaacagatccttaacctttttagtaaacgcatatgtatattttagatctccagatttcataatatgatcacatgccttaaatgtcagtgcttccatgatataatctggaacactaatgggtgacgaaaaagatacagcaccatatgctacgttgataaataaatctgaaccactaagtagataatgattaatgttaagaaagaggaaatattcagtgtataggtatgtcttggcgtcatatcttgtactaaacacgctaaacagtttgttaatgtgatcaatttccaatagattaattagagcagcgggaataccaacaaacatattaccacatccgtattttctatgaatatcacatatcatgttaaaaaatcttgatagaagagcgaatatctcgtctgacttaatgagtcgtagttcagcagcaacataagtcataactgtaaatagaacatactttcctgtagtgttgattctagactccacatcaacaccattattaaaaatagttttatatacatctttaatctgctctccgttaatcgtcgaacgttctagtatacggaaacactttgatttcttatctgtagttaatgacttagtgatatcacgaagaatattacgaattacatttcttgtttttcttgagagacctgattcagaactcaactcatcgttccatagtttttctacctcagtggcgaaatctttggagtgcttggtacatttttcaataaggttcgtgacctccatttattataaaaaatttattcaaaacttaactacaatcgggtaattataaaatcgtagatctcccatgtggcggaatactaccatctatcgcatgtggatggacagtaggtaatggccatgggaacagtaatgtttgcatatttatctttcttgccagtattactgcatattgtcccaatgtttcgatgtgatgttctaacctatcaactgccgctgtatcacaacaatagtgtccgatgaaattaagattatgatccaatgtgtttaatatatgattatcaagtcttatacgatccgcgtcttttttgacaggatcaggttcttctacaggaagaagtttcggcctcttatgatattcatgtctgggaaacggtggtctagggtgaggctccggtatcggagtgggttttggattataatcatcatcgtctatgacatcatcttcgacttcgatatttattttgctatcttgatgatgtcctgtatcagttgcattttcagcactcgactgaatattagcgcattcattgtctattattaccatatttctaaacccaaaatgtatgtgttgaacatcagtactatcgttgatgagtcttatagcatgaattcgcttatcgttatcgggtttatcttctgtcaccttagcaattccttttttattaaactctacataatcatatccatttctattgtttgttctaatataaacgagtatagcatcattgctaaatttttcaatagtatcaaaaacagaatatcctaaaccatataatatatattcaggaacactcaaactaaatgtccaggattctcctaaatacgtaaactttaatagtgcgaaatcattcaaaaatctaccacttatagatagatagtacataaatgcgtatagtagtctacctatctctttattatgaaaaccggcattacgatcatatatgtcgtgatatacctgtgatccgtttacgttaaaccataaatacatgggtgatcctataaacatgaatttatttctaattctcagagctatagttaattgaccgtgtaatatttgcttacatgcatacttgatacgcttattaataagatttttatcattgctcgttatttcagaatcgtatatataaggagtaccatcgtgattcttaccagatattatacaaaatactatatataaaatatattgacccacgttagtaatcatataaatgtttaacgttttaaattttgtattcaatgatccattatcatacgctatcatggtcttgtaatattcattctttaaaatataatattgtgttagccattgcattggagctcctaatggagattttctattctcatccattttaggataggctttcataaagtccctaataacttcgtgaataatgtttctatgttttctactgatgcatgtatttgcttcgatttttttatcccatgtttcatctatcatagatttaaacgcagtaatgctcgcaacattaacatcttgaaccgttggtacaattccgttccataaatttataatgttcgccatttatataactcattttttgaatatacttttaattaacaaaagagttaagttactcatatggacgccgtccagtctgaacatcaatctttttagccagagatatcatagccgctcttagagtttcagcgtgattttccaacctaaatagaacttcatcgttgcgtttacaacacttttctatttgttcaaactttgttgttacattagtaatctttttttccaaattagttagccgttgtttgagagtttcctcattgtcgtcttcatcggctttaacaattgcttcgcgtttagcctctggctttttagcagcctttgtagaaaaaaattcagttgctggaattgcaagatcgtcatctccggggaaaagagttccgtccatttaaagtacagattttagaaactgacactctgcgttatttatatttggtacaacacatggattataaatattgatgttaataacatcagaaaatgtaaagtctatacattgttgcatcgtgttaaattttctaatggatctagtattattgggtccaacttctgcctgaaatccaaatatggaagcggatacaaaaccgtttcctggataaaccacacatctccacttttgctttacatcagaaattgtgtcgttgacatcttgaactctcctatctaatgccggtgttccacctatagattttgaatattcgaatgctgcatgagtagcattaaattccttaatattgccataattttcatatattgagtaaccctggataaaaagtaaacacaccgcagccgtcgctaccacaataaaaaaaattgatagagagttcatttataatctattagaagctgacaaaatttttttacacgcatcagacaatgctttaataaatagttcaacatctacttttgtcatatcgaaccgatggtatgattctaacctagaattacatccgaaaaagttgactatgttcatagtcattaagtcattaacaaacaacattccagactctggattataagacgatactgtttcgtcacaattacctaccttaatcatgtgattatgaatattggctattagagcaccttctaagaaatctataatatctttgaaacacgatttaaaatcaaaccacgaatatacttctacgaagaaagttagtttacccataggagaaataactataaatggagatctaaatacaaaatccggatctatgatagttttaacattattatattctctattaaatacctccacatctaaaaatgttaattttgaaactatgtcttcgtttattaccgtacctgaactaaacgctataagctctattgtttgagaactctttaaacgatattcttgaaatacatgtaacaaagtttcctttaactcggtcggtttatctaccatagttacagaatttgtatccttatctataatataataatcaaaatcgtataaagttatataattatcgcgttcagattgggatcttttcaaatagactaaaaaccccatttctctagtaagtatcttatgtatatgtttgtaaaatatcttcatggtgggaatatgctctaccgcagttagccattcctcattgacagcggtagatgtattagacaaaactattccaatgtttaacaagggccattttacgagattattaaatccttgtttgataaatgtagccaatgagggttcgagttcaacgacgattgaattctcttcccgcggatgctgcatgatgaacgacgggatgttgttcgattgatttggaattctttttcgactttttgtttatattaaatattttaaaatttatagcggatagcaattcatgtaccacggataatgtagacgcgtattgcgcatcgatatctttattattagataaatttatcaataaatgtgagaagtttgcctcgttaaggtcttccatttaaatattatataaacatttgtgtttgtaacttattcgtcttttatggaatagttttttactagtaaagctgcaattacacactttgtccgtaaaacataaatataaacaccagcttttatcaatcgttccaaaaagtcgacggcggacatttttaacatggcatctattttaaatacacttaggtttttggaaaaaacatcattttataattgtaacgattcaataactaaagaaaagattaagattaaacataagggaatgtcatttgtattttataagccaaagcattctaccgttgttaaatacttgtctggaggaggtatatatcatgatgatttggttgtattggggaaggtaacaattaataatctaaagatgatgctattttacatggatttatcatatcatggagtgacaagtagtggagcaatttacaaattgggatcgtctatcgatagactttctctaaataggactattgttacaaaagttaataattatgatgatacattttttgacgacgatgattgatcgctattgcacaattttgtttttgtactttctaatatagtgtttaggttctttttcatatgagaatattgatttactaaaatatctatgtttaacttttgttctatgacgtccttatcggcggtatcggtacatatacgtaattcaccttcacaaaatacggagtcttcgataataatagccaatcgattattggatctagctgtctgtatcatattcaacatgtttaatatatcctttcgtttcccctttacaggcatcgatcgtagcatattttccgcgtctgatatggaaatgttaaaactacaaaaatgcgtaatgttagcccgtcctaatattggtacgtgtctataagtttggcatagtagaataatagacgtgtttaaatgccttccaaagtttaagaattctattagagtattgcattttgatagtttatcgcctacatcatcaaaaataagtaaaaagtgtgctgattttttatgattttgtgcgacagcaatacatttttctatgttacttttagttcgtatcagattatattctagagattcctgactactaacgaaattaatatgatttggccaaatgtatccatcataatctgggttataaacgggtgtaaacaagaatatatgtttatattttttaactagtgtagaaaacagagatagtaaatagatagtttttccagatccagatcctcctgttaaaaccattctaaacggcatttttaataaattttctcttgaaaattgtttttcttggaaacaattcataattatatttacagttactaaattaatttgataataaatcaaaatatggaaaactaaggttgttagtagggaggagaacaaagaaggcacatcgtgatataaataacatttattatcatgatgacaccagaaaacgacgaagagcagacatctgtgttctccgctactgtttacggagacaaaattcagggaaagaataaacgcaaacgcgtgattggtctatgtattagaatatctatggttatttcactactatctatgattaccatgtccgcgtttctcatagtgcgcctaaatcaatgcatgtctgctaacgaggctgctattactgacgccgctgttgccgttgctgctgcatcatctactcatagaaaggttgcgtctagcactacacaatatgatcacaaagaaagctgtaatggtttatattaccagggttcttgttatatattacattcagactaccagttattctcggatgctaaagcaaattgcactgcggaatcatcaacactacccaataaatccgatgtcttgactacctggctcattgattatgttgaggatacatggggatctgatggtaatccaattacaaaaactacatccgattatcaagattctgatgtatcacaagaagttagaaagtatttttgtgttaaaacaatgaactaatatttatttttgtacattaataaatgaaatcgcttaatagacaaactgtaagtaggtttaagaagttgtcggtgccggccgctataatgatgatactctcaaccattattagtggcataggaacatttctgcattacaaagaagaactgatgcctagtgcttgcgccaatggatggatacaatacgataaacattgttatttagatactaacattaaaatgtctacagataatgcggtttatcagtgtcgtaaattacgagctagattgcctagacctgatactagacatctgagagtattgtttagtattttttataaagattattgggtaagtttaaaaaagaccaatgataaatggttagatattaataatgataaagatatagatattagtaaattaacaaattttaaacaactaaacagtacgacggatgctgaagcgtgttatatatacaagtctggaaaactggttaaaacagtatgtaaaagtactcaatctgtactatgtgttaaaaaattctacaagtgacaacaaaaaatgaattaataataagtcgttaacgtacgccgccatggacgccgcgtttgttattactccaatgggtgtgttgactataacagatacattgtatgatgatctcgatatctcaatcatggactttataggaccatacattataggtaacataaaaactgtccaaatagatgtacgggatataaaatattccgacatgcaaaaatgctactttagctataagggtaaaatagttcctcaggattctaatgatttggctagattcaacatttatagcatttgtgccgcatacagatcaaaaaataccatcatcatagcatgcgactatgatatcatgttagatatagaagataaacatcagccattttatctattcccatctattgatgtttttaacgctacaatcatagaagcgtataacctgtatacagctggagattatcatctaatcatcaatccttcagataatctgaaaatgaaattgtcgtttaattcttcattctgcatatcagacggcaatggatggatcataattgatgggaaatgcaatagtaattttttatcataaaagttgtaaagtaaataataaaacaataaatattgaactagtagtacgtatattgagcaatcagaaatgatgctggtacctcttatcacggtgaccgtagttgcgggaacaatattagtatgttatatattatatatttgtaggaaaaagatacgtactgtctataatgacaataaaattatcatgacaaaattaaaaaagataaagagttctaattccagcaaatctagtaaatcaactgatagcgaatcagactgggaggatcactgtagtgctatggaacaaaacaatgacgtagataatatttctaggaatgagatattggacgatgatagcttcgctggtagtttaatatgggataacgaatccaatgttatggcgcctagcacagaacacatttacgatagtgttgctggaagcacgctgctaataaataatgatcgtaatgaacagactatttatcagaacactacagtagtaattaatgaaacggagactgttgaagtacttaatgaagataccaaacagaatcctaactattcatccaatcctttcgtaaattataataaaaccagtatttgtagcaagtcaaatccgtttattacagaacttaacaataaatttagtgagaataatccgtttagacgagcacatagcgatgattatcttaataagcaagaacaagatcatgaacacgatgatatagaatcatcggtcgtatcattggtgtgattagtttcctttttataaaattgaagtaatatttagtattattgctgccgtcacgttgtacaaatggagatattccctgtattcggcatttctaaaattagcaattttattgctaataatgactgtagatattatatagatacagaacatcaaaaaattatatctgatgagatcaatagacagatggatgaaacggtacttcttaccaacatcttaagcgtagaagttgtaaatgacaatgagatgtaccatcttattcctcatagattatcgacgattatactctgtattagttctgtcggaggatgtgttatctctatagataatgacatcaatggcaaaaatattctaacctttcccattgatcatgctgtaatcatatccccactgagtaaatgtgtcgtagttagcaagggtcctacaaccatattggttgttaaagcggatatacctagcaaacgattggtaacatcgtttacaaacgacatactatatgtaaacaatctgtcactgattaattatttgccgttgtctgtattcattattagacgagtcaccgactatttggatagacacatatgcgatcagatatttgctaataataagtggtattcccttataaccatcgacgataagcaatatcctattccatcaaactgtataggtatgtcctctgccaagtacataaattctagcatcgagcaagatactttaatccatgtttgtaacctcgagcatccgttcgactcagtatacaaaaaaatgcagtcgtacaattctctacctatcaaggaacaaatattgtacggtagaattgataatataaatatgagcattagtatttctgtggattaatagatttctagtatggggatcattaatcatctctaatctctaaatacctcataaaacgaaaaaaaagctattatcaaatactgtacggaatggattcattctcttctctttttatgaaactctgttgtatatctactgataaaactggaagcaaaaaatctgatagaaagaataagaataagatcaaggattatatggaacacgattattataaaataacaatagttcctggttcctcttccacgtctactagctcgtggtattatacacatgcctagtaatagtctctttgcgttgacggaaagcagactagaaataacaggctaaaatgttcagacaccataatagttcccaacccagataataacagagttccatcaacacattcctttaaactcaatcccaaacccaaaaccgttaaaatgtatccggccaattgatagtagataatgaggtgtacagcgcatgataatttacacagtaaccaaaatgaaaacactttagtaattataagaaatatagacggtaatgtcatcatcaacaatccgataatatgcctgagagtaaacattgatggataaaacaaaaatgctccgcataactctatcatggcaataacacaaccaaacacttgtaaaattcctaaattagtagaaaatacaacggatatcgatgtataagtgatctcgagaaataataagaataaagtaatgcccgtaaagataaacatcaacattgtttggtaatcattaaaccaattagtatgaagttgaactaatttcacagtagattttattccagtgttatcctcgcatgtataagtacctggtaagatatctttatattccataatcaatgagacatcactatccgataacgaatgaagtctagcactagtatgccatttacttaatattgtcgtcttggaagttttattataagttaaaatatcatggttatccaatttccatctaatatactttgtcggattatctatagtacacggaataatgatggtatcattacatgctgtatactctatagtctttgtagttgttataacaaccaacgtatagaggtatatcaacgatattctaactcttgacattttttatttatttaaaatgatacctttgttatttattttattctattttgctaacggtattgaatggcataagtttgaaacgagtgaagaaataatttctacttacttattagacgacgtattatacacgggtgttaatggggcggtatacacattttcaaataataaactaaacaaaactggtttaactaataataattatataacaacatctataaaagtagaggatgcggataaggatacattagtatgcggaaccaataacggaaatcccaaatgttggaaaatagacggttcagacgacccaaaacatagaggtagaggatacgctccttatcaaaatagcaaagtaacgataatcagtcacaacggatgtgtactatctgacataaacatatcaaaagaaggaattaaacgatggagaagatttgacggaccatgtggttatgatttatacacggcggataacgtaattccaaaagatggtttacgaggagcattcgtcgataaagatggtacttatgacaaagtttacattcttttcactgatactatcggctcaaagagaattgtcaaaattccgtatatagcacaaatgtgcctaaacgacgaaggtggtccatcatcattgtctagtcatagatggtcgacgtttctcaaagtcgaattagaatgtgatatcgacggaagaagttatagacaaattattcattctagaactataaaaacagataatgatacgatactatatgtattcttcgatagtccttattccaagtccgcattatgtacctattctatgaataccattaaacaatctttttctacgtcaaaattggaaggatatacaaagcaattgccgtctccagctcctggtatatgtctaccagctggaaaagttgttccacataccacgtttgaagtcatagaaaaatataatgtactagatgatattataaagcctttatctaaccaacctatcttcgaaggaccgtctggtgttaaatggttcgatataaaggagaaggaaaatgaacatcgggaatatagaatatacttcataaaagaaaattctatatattcgttcgatacaaaatctaaacaaactcgtagctcgcaagtcgatgcgcgactattttcagtaatggtaactgcgaaaccgttatttatagcagatatagggataggagtaggaatgccacaaatgaaaaaaatacttaaaatgtaatcttaatcgagtacaccacacgacaatgaacaaacataagacagattatgctggttatgcttgctgcgtaatatgcggtctaattgttggaattatttttacagcgacactattaaaagttgtagaacgtaaattagttcatacaccatcaatagataaaacgataaaagatgcatatattagagaagattgtcctactgactggataagctataataataaatgtatccatttatctactgatcgaaaaacctgggaggaaggacgtaatgcatgcaaagctctaaattcaaattcggatctaattaagatagagactccaaacgagttaagttttttaagaagccttagacgaggctattgggtaggagaatccgaaatattaaaccagacaaccccatataattttatagctaagaatgccacgaagaatggaactaaaaaacggaaatatatttgtagcacaacgaatactcccaaactgcattcgtgttacactatataacaattacactacatttttatcataccactacttcggttagatgttttagaaaaaaataaatatcgccgtaccgttcttgtttttataaaaataacaattaacaattatcaaattttttctttaatattttacgtggttgaccattcttggtggtaaaataatctcttagtgttggaatggaatgctgtttaatgtttccacactcatcgtatattttgacgtatgtagtcacatcgtttacgcaatagtcagactgtagttctatcatgcttcctacatcagaaggaggaacagttttaaagtctcttggttttaatctattaccgttagttttcatgaaatcctttgttttatccacttcacattttaaataaatgtccactatacattcttttgttaattttactagatcgtcatgggtcatagaatttataggttccgtagtccatggatccaaactagcaaacttcgcgtatacggtatcgcgattagtgtatacaccaactgtatgaaaattaagaaaacagtttaatagatcaacagaaatatttaatcctccgtttgatacagatgcgccatatttatggatttcggattcacacgttgtttgtctgaggtgttcgtctagcgttgcttctacgtaaacttcgattcccatatattctttattgtcagaatcgcataccgatttatcatcatacactgtttgaaaactaaatggtatacacatcaaaataataaatactaacgagtacattctgcaatattgttatcgtaattggaaaattagtgttcgagtgagtcggattatgtgagtactggattttatattttgtaataagaataaaatgctaatgtcaagtcttattaaaaacatatataataaataacaatggctgaatggcataaaattatcgaggatatctcaaaaaataataagttcgaggatgccgccatcgttgattacaagactacaaagaatgttctagctgctattcctaacagaacatttgccaagattaatccgggtgaaattattcctctcatcactaatcgtaatattctaaaacctcttattggtcagaaatattgtattgtatatactaactctctaatggatgagaacacgtatgctatggagttgcttactgggtacgcccctgtatctccgatcgttatagcgagaactcataccgcacttatatttttgatgggtaagccaacaacatccagacgtgacgtgtatagaacgtgtagagatcacgctacccgtgtacgtgcaactggtaattaaaataaaaagtaatattcatatgtagtgtcaattttaaatgatgatgatgaaatggataatatccatattgacgatgtcaataatgccggtattggcatacagttcatcgatttttagatttcattcagaggatgtggaattatgttatgggcatttgtattttgataggatctataatgtagtaaatataaaatataatccgcatattccatatagatataattttattaatcgcacgttaaccgtagatgaactagacgataatgtcttttttacacatggttattttttaaaacacaaatatggttcacttaatcctagtttgattgtctcattatcaggaaacttaaaatataatgatatacaatgctcagtaaatgtatcgtgtctcattaaaaatttggcaacgagtacatctactatattaacatctaaacataagacttattctctacatcggtccacgtgtattactataataggatacgattctattatatggtataaagatataaatgacaagtataatgacatctatgattttactgcaatatgtatgctaatagcgtctacattgatagtgaccatatacgtgtttaaaaaaataaaaatgaactcttaattatgctatgctattagaaatggataaaatcaaaattacggttgattcaaaaattggtaatgttgttaccatatcgtataacttggaaaagataactattgatgtcacacctaaaaagaaaaaagaaaaggatgtattattagcgcaatcagttgctgtcgaagaggcaaaagatgtcaaggtagaagaaaaaaatattatcgatattgaagatgacgatgatatggatgtagaaagcgcgtaatacgatctataaaaataagtatataaatactttttatttactgtactcttactgtgtagtggtgataccctactcgattatttttttaaaaaaaaaatacttattctgattcttctagccatttccgtgttcgtttgaatgccacatcgacgtcaaagataggggagtagttgaaatctagttctgcattgttggtacgcacctcaaatgtagtgttggatatcttcaacgtatagttgttgagtagtgatggttttctaaatagaattctcttcatatcattcttgcacgcgtacatttttagcatccatcttggaatcctagatccttgttctattcccaatggtttcatcaatagaagattaaacatatcgtacgaacacgatggagagtaatcgtagcaaaagtaagcatttcctttaatcttagatcccggatactggatatattttgcagccaacacgtgcatccatgcagcatttcctacatatacccggctatgcaccgcgtcatcatcgactgtacgatacataatgttaccgtgttgcttacattgctcgtaaaagactttcatcaatttgtctccttctccgtaaattccagtgggtcttaggcaacaagtatacaattttgctccattcatgattacggaattattggctttcataaccagttgctcggccatacgtttactttttgcgtatacatgtcctggtgatatatcataaagggtatgctcatggccgatgaatggatcaccgtgtttattgggtcctattgcttccatgctactagtatagatcaaatacttgattcctaggtccacacaagctgccaaaatagtctgtgttccataatagtttactttcatgatttcattatcggtgtattttccaaatacatccactagagcagccgtatgaataatcagatttaccccatctagcgcttctctcaccttatcaaagtcgtttatatcacattgtatatagtttataaccttaactttcgaggttattggttgtggatcttctacaatatctatgactctgatttcttgaacatcatctgcactaattaacagttttactatatacctgcctagaaatccggcaccaccagtaaccgcgtacacggccattgctgccactcataatatcagactacttattctattttactaaataatggctgtttgtataatagaccacgataatatcagaggagttatttactttgaaccagtccatggaaaagataaagttttaggatcagttattggattaaaatccggaacgtatagtttgataattcatcgttacggagatattagtcaaggatgtgattccataggcagtccagaaatatttatcggtaacatctttgtaaacagatatggtgtagcatatgtttatttagatacagatgtaaatatatttacaattattggaaaggcgttatctatttcaaaaaatgatcagagattagcgtgtggagttattggtatttcttacataaatgaaaagataatacattttcttacaattaacgagaatggcgtttgatatatcagttaatgcgtctaaaacaataaatgcattagtttacttttctactcagcaaaataaattagtcatacgtaatgaagttaatgatacacactacactgtcgaatttgatagggacaaagtagttgacacgtttatttcatataatagacataatgacaccatagagataagaggggtgcttccagaggaaactaatattggttgcgcggttagtatgacttacttgtataataagtatagttttaaactgattttagcagaatatataagacacagaaatactatatccggcaatatttattcggcattgatgacactagatgatttggctattaaacagtatggagacattgatctattatttaatgagaaacttaaagtagactccgattcgggactatttgactttgtcaactttgtaaaggatatgatatgttgtgattctagaatagtagtagctctatctagtctagtatctaaacattgggaattgacaaataaaaaatataggtgtatggcattagccgaacatatatctgatagtattccaatatctgagctatctagactacgatacaatctatgtaagtatctacgcggacacactgagagcatagaggataaatttgattattttgaagacgatgattcgtctacatgttctgccgtaaccgacagggaaacggatgtataattttttttatagcgtgaaggatatgataaaaaatataattgttgtatttatcccattccaatcaccttatatgattctgtaacacaataaaggagtcttatagatgtatagaggtcagatactggtttgataaactgtttattccacataagtatgtttgactttatggttagacccgcatactttaacaaatcactgaaaattggagttaggtattgacctctcagaatcagttgccgttctggaacattaaatgtattttttatgatatactccaacgcatttatgtgggcatacaacaagtcattactaatggagtattccaagagttttagttgtctagtatttaacaagagaagagatttcaacagactgtttatgaactcgaatgccgcctcattgtcgcttatattgatgatgtcgaattctcccaatatcatcaccgatgagtagctcatcttgttatcgggatccaagttttctaaagatgtcattaaaccctcgatcatgaatggatttatcatcatcgtttttatgttggacatgagcttagtccgtttgtccacatctatagacgacgatttctgaattatttcatatatctctctctttaactccaggaacttgtcaggatggtctactttaatatgttctcgtctaagagatgaaaatctttggatggttgcacgcgacttttctctaaaggatgacgttgcccaagatcctctcttaaatgaatccatcttatccttggacaagatggacagtctattttccttagatggtttaatatttttgttacccatgatctataaaggtagacctaatcgtctcggatgaccatatatttattttcagttttattatacgcataaattgtaaaaaatatgttaggtttacaaaaatgtctcgtggggcattaatcgtttttgaaggattggacaaatctggaaaaacaacacaatgtatgaacatcatggaatctataccggcaaacacgataaaatatcttaactttcctcagagatccactgtcactggaaaaatgatagatgactatctaactcgtaaaaaaacctataatgatcatatagttaatctattattttgtgcaaatagatgggagtttgcatcttttatacaagaacaactagaacagggaattactttaatagttgatagatacgcattttctggagtagcgtatgccgccgctaaaggcgcgtcaatgactctcagtaagagttatgaatctggattgcctaaacccgacttagttatattcttggaatctggtagcaaagaaattaatagaaacgtcggtgaggaaatttatgaagatgttacattccaacaaaaggtattacaagaatataaaaaaatgattgaagaaggagatattcattggcaaattatttcttctgaattcgaggaagatgtaaagaaggagttgattaagaatatagttatagaggctatacacacggttactggaccagtggggcaactgtggatgtaatagtgaaattacattttttataaatagatgttagtacagtgttataaatggatgaagcatattactctggcaacttggaatcagtactcggatacgtgtccgatatgcataccgaactcgtatcaatatctcaattagttattgccaagatagaaactatagataatgatatattaaacaaggacattgtaaattttatcatgtgtagatcaaacttggataatccatttatctctttcctagatactgtatatactattatagatcaagagaactatcagactgagttgattaattcattagacgacaatgaaattatcgattgtatagttaataagtttatgagcttttataaggataacctagaaaatatagtagatgctatcatcactctaaaatatataatgaataatccagattttaaaactacgtatgcagaagtactcggttccagaatagcggatatagatattaaacaagtgatacgtgagaatatactacaattgtctaataatatccgcgaacgatatttgtgaaaaatattaaaaaaaaatactttttttattaaatgacgtcgcttcgcgaatttagaaaattatgctgtgatatatatcacgcatcaggatataaagaaaaatctaaattaattagagactttataacagatagggatgataaatatttgatcattaagctattgcttcccggattagacgatagaatttataacatgaacgataaacaaattataaaattatatagtataatatttaaacaatctcaggaagatatgctacaagatttaggatacggatatataggagacactattaggactttcttcaaagagaacacagaaatccgtccacgagataaaagcattttaactttagaagaagtggatagtttcttaactacgttatcatccgtaactaaagaatcgcatcaaataaaattattgactgatatcgcatccgtttgtacatgtaatgatttaaaatgtgtagtcatgcttattgataaagatctaaaaattaaagcgggtcctcggtacgtacttaacgctattagtcctcatgcctatgatgtgtttagaaaatctaataacttgaaagagataatagaaaattcatctaaacaaaatctagactctatatctatttctgttatgactccaattaatcccatgttagcggaatcgtgtgattctgtcaataaggcgtttaaaaaatttccatcaggaatgtttgcggaagtcaaatacgatggtgaaagagtacaagttcataaaaataataacgagtttgccttctttagtagaaacatgaaaccagtactctctcataaagtggattatctcaaagaatacataccgaaagcatttaaaaaagctacgtctatcgtattggattctgaaattgttcttgtagacgaacataatgtaccgctcccgtttggaagtttaggaatacacaaaaagaaagaatataaaaactctaacatgtgtttgttcgtgtttgactgtttgtactttgatggattcgatatgacggacattccattgtacgaacgaagatcttttctcaaagatgttatggttgaaatacccaatagaatagtattctcagagttgacgaatattagtaacgagtctcagttaactgacgtattggatgatgcactaacgagaaaattagaaggattggtcttaaaagatattaatggagtatacgaaccgggaaagagaagatggttaaaaataaagcgagactatttgaacgagggttccatggcagattctgccgatttagtagtactaggtgcctactatggtaaaggagcaaagggtggtatcatggcagtctttctaatgggttgttacgacgatgaatccggtaaatggaagacggttaccaagtgttcaggacacgatgataatacgttaagggagttgcaagaccaattaaagatgattaaaattaacaaggatcccaaaaaaattccagagtggttagtagttaataaaatctatattcccgattttgtagtagaggatccgaaacaatctcagatatgggaaatttcaggagcagagtttacatcttccaagtcccataccgcaaatggaatatccattagatttcctagatttactaggataagagaggataaaacgtggaaagaatctactcatctaaacgatttagtaaacttgactaaatcttaatagttacatacaaactgaaaattaaaataacactatttagttggtggtcgccatggatggtgttattgtatactgtctaaacgcgctagtaaaacatggcgaggaaataaatcatataaaaaatgatttcatgattaaaccatgttgtgaaagagtttgtgaaaaagtcaagaacgttcacatcggcggacaatctaaaaacaatacagtgattgcagatttgccatatctggataatgctgtatcggatgtatgcaattcactgtataaaaagaatgtatcaagaatatccagatttgctaatttgataaagatagatgacgatgacaagactcctactggtgtatataattattttaaacctaaagatgccattcctgttattatatctataggaaaggatagagatgtctgtgaactattaatctcatcagacatatcgtgtgcatgcgtggagttaaattcatatcacgtagccattcttcccatggatgtttccttttttaccaaaggaaatgcatcattgattattctcctgtttgatttctctatcgatgcggcacctctcttaagaagtgtaaccgataataatgttattatatctagacaccagcgtctacatgacgagcttccgagttccaattggttcaagttttacataagtataaagtccgactattgttctatattatatatggttgttgatggatctgtgatgcatgcgatagctgataatagaactcacgcaattattagcaaaaatatattagacaatactacgattaacgatgagtgtagatgctgttattttgaaccacagattaggattcttgatagagatgagatgctcaatggatcatcgtgtgatatgaacagacattgtattatgatgaatttacctgatgtaggcgaatttggatctagtatgttggggaaatatgaacctgacatgattaagattgctctttcggtggctggtaatttaataagaaatcgagactacattcccgggagacgaggatatagctactacgtttacggtatagcctctagataatttttttaagcacgaaataaaaaacataattttaaaccaatctatttcatactattttgtgtgatcaccatggacataaagatagatattagtatttctggtgataaatttacggtgactactaggagggaaaatgaagaaagaaaaaaatatctacctctccaaaaagaaaaaactactgatgttatcaaacctgattatcttgagtacgatgacttgttagatagagatgagatgtctactattctagaggaatattttatgtacagaggtctattaggcctcagaataaaatatggacgactctttaacgaaattaaaaaattcgacaatgatgcggaagaacaattcggtactatagaagaactcaagcagaaacttagattaaattctgaagagggagcagataactttatagattatataaaggtacaaaaacaggatatcgtcaaacttactgtatacgattgcatatctatgataggattgtgtgcatgcgtggtagatgtttggagaaatgagaaactgttttctagatggaaatattgtttacgagcgattaaactgtttattaatgatcacatgcttgataagataaaatctatactgcagaatagactagtatatgtggaaatgtcatagaaagttaaaagttaatgagagcaaaaatatataaggttgtattccatatttgttattttttctgtaatagttaaaaaatacattcgatggtctatctatcagattattatgtgttataaggtactttttctcataataaactagagtatgagtaagatagtgtttttcaaaacatataaatctaaaattgatggatgagatatacagctattaatttcgaaaatatattttaatctgataactttaaacatggatttttgatggtggtttaacgttttaaaaaaagattttgttattgtagtatatgataatattaaaagatggatataaagaatttgctgactgcatgtactattttttacattactacattggctacggcagatatacctacttcgtcactgccacacgctccggtaaacggggcatgtgacgagggagaatatcttgataagaggcataatcaatgttgtaatcagtgtccacctggagaatttgccaaggtcagatgtaatggtaacgataacacaaaatgtgaacgctgcccacctcatacatataccgcaatccccaattactctaatggatgtcatcaatgtagaaaatgcccaacaggatcatttgataaggtaaagtgtaccggaacacagaacagtaaatgttcgtgtcttcctggttggtattgcgctactgattcttcacagactgaagattgtcgagattgtataccaaaaaggagatgtccatgcggatactttggtggaatagatgaacaaggaaatcctatttgtaaatcgtgttgtgttggtgaatattgcgactacctacgtaattatagacttgatccatttcctccatgcaaactatctaaatgtaattaattatgattttgatgataatgttaccatacattatatcgctacttggttagtgtattattcagtatgaagacctattaataattacttatcttttgacgatcttgttataattataatataaaaacttatggcatagtaacttataattgctgacgcgataaattcgtaataatctgttttgttcaaaggaatctacaggcataaaaataaaaatataatttataatatactcttacagcgcgccatcatgaataacagcagtaaattaattgctgttattaatggatttagaaatagtggacgattttgtgatattaatatagttattaatgatgaaaggataaacgctcacagactcatcctatctggagcctccgaatatttttccattctgttttccaataattttatcgattctaatgaatacgaagttaatctaagtcatttagattatcaaagcgtaaacgatttgatcgattacatttatgggatacctttgagcctaactaacgataacgtgaaatatattctttcaaccgctgattttttacaaattggatctgctattacggagtgtgaaaattacatacttaaaaatctttgttctagaaactgtatcgatttctacatatacgctgataaatataataacaagaaaatagaatcagcgtcgtttaacacaatattacaaaatattttgagactcatcaacgatgaaaactttaaatacttaacagaggaatcaatgataaaaattttaagcgatgatatgttaaatataaaaaatgaggatttcgccccactaattctcattaaatggttagagagtactcaacaaccatgcaccgtcgagttacttaaatgcctcagaatatcattgctttccccacaagttataaaatcactttatagtcatcgactggttagttcaatctacgaatgtataacattcttaaacaatatagcattcttggatgaatcatttcctagataccatagcatcgagttgatatctatcggtataagtaattcgcatgataagatttccataaactgctacaatcataaaaaaaatacatgggaaatgatatcttcacgtagatataggtgtagtttcgcagtggccgtcctggataatattatttatatgatgggtggatatgatcagtccccgtatagaagttcaaaggttatagcgtacaatacatgtacaaattcttggatatatgatataccagagctaaaatatcctcgttctaattgtgggggactggctgatgacgaatacatttattgtataggcggcatacgcgatcaggattcatcgttgacatctagtattgatagatggaagccatcaaaaccatattggcagaagtatgctaaaatgcgcgaaccaaaatgtgatatgggggttgcgatgttaaacggattaatatatgttataggtggaatcgttaaaggtgacacgtgtaccgacgcactagagagtttatcagaagatggatggatgaagcatcaacgtcttccaataaaaatgtccaatatgtcgacgattgttcatgatggcaagatttatatatctggaggttacaacaatagtagtgtagttaatgtaatatcgaatttagtccttagctataattcgatatatgatgaatggaccaaattatcatcattaaacattcctagaattaatcccgctctatggtcagcgcataataaattatatgtaggaggaggaatatctgatgatgttcgaactaatacatctgaaacatacgacaaagaaaaagattgttggacattggataatggtcacgtgttaccacgcaattatataatgtataaatgcgaaccgattaaacataaatatccattggaaaaaacacagtacacgaatgattttctaaagtatttggaaagttttataggtagttgatagaacaaaatacataattttgtaaaaataaatcactttttatactaatatgacacgattaccaatacttttgttactaatatcattagtatacgctacaccttttcctcagacatctaaaaaaataggtgatgatgcaactctatcatgtaatcgaaataatacaaatgactacgttgttatgagtgcttggtataaggagcccaattccattattcttttagctgctaaaagcgacgtcttgtattttgataattataccaaggataaaatatcttacgactctccatacgatgatctagttacaactatcacaattaaatcattgactgctagagatgccggtacttatgtatgtgcattctttatgacatcgcctacaaatgacactgataaagtagattatgaagaatactccacagagttgattgtaaatacagatagtgaatcgactatagacataatactatctggatctacacattcaccggaaactagttctgagaaacctgattatatagataattctaattgctcgtcggtattcgaaatcgcgactccggaaccaattactgataatgtagaagatcatacagacaccgtcacatacactagtgatagcattaatacagtaagtgcatcatctggagaatccacaacagacgagactccggaaccaattactgataaagaagatcatacagtcacagacactgtctcatacactacagtaagtacatcatctggaattgtcactactaaatcaaccaccgatgatacgtacaatgataatgatacagtaccaccaactactgtaggcggtagtacaacctctattagcaattataaaaccaaggactttgtagaaatatttggtattaccgcattaattatattgtcggccgtggcaatattctgtattacgtattatatatgtaataaacgttcacgtaaatacaaaacagagaacaaagtctagatttttgacttacataaatgtctgggatagtaaaatctatcatattgagcgggccatctggtttaggaaagacagccatagccaaaagactatgggaatatatttggatttgtggtgtcccataccactagatttcctcgtcctatggaacgagaaggtgtcgattaccattacgttaacagagaggccatctggaagggaatagccgccggaaactttctagaacatactgagtttttaggaaatatttacggaacttctaaaactgctgtgaatacagcggctattaataatcgtatttgtgtgatggatctaaacatcgatggcgttagaagtcttaaaaatacgtacctaatgccttactcggtgtatataagacctacctctcttaaaatggttgagaccaagcttcgttgtagaaacactgaagcggatgatgagattcatcgtcgtgtgatgttggcaaaaactgacatggatgaggcaggtgaagccggtctattcgacactattatcattgaagatgatgtgaatttagcatatagtaagttaattcagatactacaggaccgtattagaatgtattttaacactaattagagacttaagacttaaaacttgataattaataatataactcgtttttatatgtggctatttcaacgtctaatgtattagttaaatattaaaacttaccacgtaaaacttaaaatttaaaatgatatttcattgacagatagatcacacattatgaactttcaaggacttgtgttaactgacaattgcaaaaatcaatgggtcgttggaccattaataggaaaaggtggattcggtagtatttatactactaatgacaataattatgtagtaaaaatagagcccaaagctaacggatcattatttaccgaacaggcattttatactagagtacttaaaccatccgttatcgaagaatggaaaaaatctcacaatataaagcacgtaggtcttatcacgtgcaaggcatttggtctatacaaatccattaatgtggaatatcgattcttggtaattaatagattaggtgcagatctagatgcggtgatcagagccaataataatagattaccaaaaaggtcggtgatgttgatcggaatcgaaatcttaaataccatacaatttatgcacgagcaaggatattctcacggagatattaaagcgagtaatatagtcttggatcaaatagataagaataaattatatctagtggattacggattggtttctaaattcatgtctaatggcgaacatgttccatttataagaaatccaaataaaatggataacggtactctagaatttacacctatagattcgcataaaggatacgttgtatctagacgtggagatctagaaacacttggatattgtatgattagatggttgggaggtatcttgccatggactaagatatctgaaacaaagaattgtgcattagtaagtgccacaaaacagaaatatgttaacaatactgcgactttgttaatgaccagtttgcaatatgcacctagagaattgctgcaatatattaccatggtaaactctttgacatattttgaggaacccaattacgacaagtttcggcacatattaatgcagggtgtatattattaagtgtggtgtttggtcgataaaaattaaaaaataacttaatttattattgatctcgtgtgtacaaccgaaatcatggcgatgttttacgcacacgctctcggtgggtacgacgagaatcttcatgcctttcctggaatatcatcgactgttgccaatgatgtcaggaaatattctgttgtgtcagtttataataacaagtatgacattgtaaaagacaaatatatgtggtgttacagtcaggtgaacaagagatatattggagcactgctgcctatgtttgagtgcaatgaatatctacaaattggaaatccgatccatgatcaagaaggaaatcaaatctctatcatcacatatcgccacaaaaactactatgctctaagcggaatcgggtacgagagtctagacttgtgtttggaaggagtagggattcatcatcacgtacttgaaacaggaaacgctgtatatggaaaagttcaacatgattattctactatcaaagagaaggccaaagaaatgagtgcacttagtccaggacctatcatcgattaccacgtctggataggagattgtatctgtcaagttactgctgtggacgtacatggaaaggaaattatgaaaatgagattcaaaaagggtgcggtgcttccgatcccaaatctggtaaaagttaaacttggggagaatgatacagaaaatctttcttctactatatcggcgacaccatcgaggtaaccacctctctggaagacagcgtgaataatgtactcatgaaacgtttggaaactatacgccatatgtggtctgttgtatatgatcattttgatattgtgaatggtaaagaatgctgttatgtgcatacgcatttgtctaatcaaaatcttataccgagtactgtaaaaacaaatttgtacatgaagactatgggatcatgcattcaaatggattccatggaagctctagagtatcttagcgaactgaaggaatcaggtggatggagtcccagaccagaaatgcaggaatttgaatatccagatggagtggaagacactgaatcaattgagagattggtagaggagttcttcaatagatcagaacttcaggctggtgaatcagtcaaatttggtaattctattaatgttaaacatacatctgtttcagctaagcaactaagaacacgtatacggcagcagcttccttctatactctcatcttttaccaacacaaagggtggatatttgttcattggagttgataataatacacacaaagtatttggattcacggtgggttacgactacctcagactgatagagaatgatatagaaaagcatatcaaaagactttgtgttgtgtatttctgtgagaagaaagaggacatcaagtacgcgtgtcgattcatcaaggtatataaacctggggatgaggctacctcgacatacgtgtgcgctatcaaagtggaaagatgctgttgtgctgtgtttgcagattggccagaatcatggtatatggatactaatggtatcaagaagtattctccagatgaatgggtgtcacatataaaattttaattaatgtaactatagagaacaaataataaggttgtaatatcatatagacaataactaacaattaattagtaactgttatctcttttttaattaaccaactaactatatacctattaatacatcgtaattatagttcttaacatctattaatcattaattcgcttctttaattttttataaactaacattgttaattgaaaagggataacatgttacagaatataaattatatatggatttttttaaaaaggaaatacttgactggagtatatatttatctcttcattatatagcacgcgtgttttccaatttttccacatcccatataatacaggattataatctcgttcgaacatacgagaaagtggataaaacaatagttgattttttatctaggttgccaaatttattccatattttagaatatggggaaaatattctacatatttattctatggatgatgctaatacgaatattataattttttttctagatagagtattaaatattaataagaacgggtcatttatacacaatctcgggttatcatcatccattaatataaaagaatatgtatatcaattagttaataatgatcatccagataataggataagactaatgcttgaaaatggacgtagaacaagacattttttgtcctatatatcagatacagttaatatctatatatgtattttaataaatcatggattttatatagatgccgaagacagttacggttgtacattattacatagatgtatatatcactataagaaatcagaatcagaatcatacaatgaattaattaagatattgttaaataatggatcagatgtagataaaaaagatacgtacggaaacacaccttttatcctattatgtaaacacgatatcaacaacgtggaattgtttgagatatgtttagagaatgctaatatagactctgtagactttaatagatatacacctcttcattatgtctcatgtcgtaataaatatgattttgtaaagttattaatttctaaaggagcaaatgttaatgcgcgtaataaattcggaactactccattttattgtggaattatacacggtatctcgcttataaaactatatttggaatcagacacagagttagaaatagataatgaacatatagttcgtcatttaataatttttgatgctgttgaatctttagattatctattatccagaggagttattgatattaactatcgtactatatacaacgaaacatctatttacgacgctgtcagttataatgcgtataatacgttggtctatctattaaacaaaaatggtgattttgagacgattactactagtggatgtacatgtatttcggaagcagtcgcaaacaacaacaaaataataatggaagtactattgtctaaacgaccatctttgaaaattatgatacagtctatgatagcaattactaaacataaacagcataatgcagatttattgaaaatgtgtataaaatatactgcgtgtatgaccgattatgatactcttatagatgtacagtcgctacagcaatataaatggtatattttaagatgtttcgatgaaatagatatcatgaagagatgttatataaaaaataaaactgtattccaattagttttttgtatcaaagacattaatactttaatgagatacggtaaacatccttctttcgtgaaatgcactagtctcgacgtatacggaagtcgtgtacgtaatatcatagcatctattagatatcgtcagagattaattagtctattatccaagaagctggatcctggagataaatggtcgtgttttcctaacgaaataaaatataaaatattggaaaactttaacgataacgaactatccacatatctaaaaatcttataaacattattaaaatataaaatctaagtaggataaaatcacactacatcattgtttccttttagtgctcgacagtgtatactatttttaacgctcataaataaaaatgaaaacgatttccgttgttacgttgttatgcgtactacctgctgttgtttattcaacatgtactgtacccactatgaataacgctaaattaacgtctaccgaaacatcgtttaatgataaccagaaagttacgtttacatgtgatcagggatatcattctttggatccaaatgctgtctgtgaaacagataaatggaaatacgaaaatccatgcaaaaaaatgtgcacagtttctgattatgtctctgaactatataataaaccgctatacgaagtgaattccaccatgacactaagttgcaacggcgaaacaaaatattttcgttgcgaagaaaaaaatggaaatacttcttggaatgatactgttacgtgtcctaatgcggaatgtcaacctcttcaattagaacacggatcgtgtcaaccagttaaagaaaaatactcatttggggaatatataactatcaactgtgatgttggatatgaggttattggtgcttcgtacataagttgtacagctaattcttggaatgttattccatcatgtcaacaaaaatgtgatatgccgtctctatctaatggattaatttccggatctacattttctatcggtggcgttatacatcttagttgtaaaagtggttttacactaacggggtctccatcatccacatgtatcgacggtaaatggaatcccgtactcccaacatgtgtacgatctaacgaaaaatttgatccagtggatgatggtcccgacgatgagacagatttgagcaaactctcgaaagacgttgtacaatatgaacaagaaatagaatcgttagaagcaacttatcatataatcatagtggcgttaacaattatgggcgtcatatttttgatctccgttatagtattagtttgttcctgtgacaaaaataatgaccaatataagttccataaattgctaccgtaaatataaatccgttaaaataattaataacgaacaagtatcaaaagattaaagacttatagctagaatcaattgagatgtcttcttcagtggatgttgatatctacgatgccgttagagcatttttactcaggcactattatgacaagagatttattgtgtatggaagaagtaacgccatattacataatatatacaggctatttacaagatgcgccgttataccgttcgatgatatagtacgtactatgccaaatgaatcacgtgttaaacaatgggtgatggatacacttaatggtataatgatgaatgaacgcgatattactgtatgtgtgggcaccggactacgattcatggaaatgtttttcgattacaataaaaatagtatcaacaatcaactaatgtatgatataattctagctaatgagagatatagaagcgcttttaacgacgatggtatatacatccgtagaaatatgattaacaagttgtacggatacgcatctctaactactattggcacgatcgctggaggtgtttgttattatctgttgatgcatctagttagtttgtataaataattatttcaatatactagttaaaattttaagattttaaatgtataaaaaactaataacgtttttatttgtaataggtgcattagcatcctattcgaataatgagtacactccgtttaataaactgagtgtaaaactctatatagatggagtagataatatagaaaattcatatactgatgataataatgaattggtgttaaattttaaagagtacacaatttctattattacagagtcatgcgacgtcggatttgattccatagatataaatgttataaacgactataaaattattgatatgtataccattgactcgtctactattcaacgcagaggtcacacgtgtagaatatctaccaaattatcatgccattatgataagtacccttatattcacaaatatgatggtgatgagcgacaatattctattactgcagagggaaaatgctataaaggaataaaatatgaaataagtatgatcaacgatgatactctattgagaaaacatactcttaaaattggatctacttatatatttgatcgtcatggacatagtaatacatattattcaaaatatgatttttaaaaatttaaaatatattatcacttcagtgacagtagtcaaataacaaacaacaccatgagatatattataattctcgcagttttgttcattaatagtatacatgctaaaataactagttataagtttgaatccgtcaattttgattccaaaattgaatggactggggatggtctatacaatatatcccttaaaaattatggcatcaagacgtggcaaacaatgtatacaaatgtaccagaaggaacatacgacatatccgcatttccaaagaatgatttcgtatctttctgggttaaatttgaacaaggcgattataaagtggaagagtattgtacgggactatgcgtcgaagtaaaaattggaccaccgactgtaacattgactgaatacgacgaccatatcaatttgtacatcgagcatccgtatgctactagaggtagcaaaaagattcctatttacaaacgcggtgacatgtgtgatatctacttgttgtatacggctaacttcacattcggagattctaaagaaccagtaccatatgatatcgatgactacgattgcacgtctacaggttgcagcatagactttgtcacaacagaaaaagtgtgcgtgacagcacagggagccacagaaaggtttctcgaaaaaattactccatggagttcgaaagtatgtctgacacctaaaaagagtgtatatacatgcgcaattagatccaaagaagatgttcccaatttcaaggacaaaatggccagagttatcaagagaaaatttaatacacagtctcaatcttatttaactaaatttctcggtagcacatcaaatgatgttaccacttttcttagcatgcttaacttgactaaatattcataactaatttttattaatgatacaaaaacgaaataaaactgcatattatacactggttaacgcccttataggctctaaccattttcaagatgaggtccctgattatagtccttctgttcccctctatcatctactccatgtctattagacaatgtgagaagactgaagaggaaacatggggattgaaaatagggttgtgtataattgccaaagatttctatcccgaaagaactgattgcagtgttcatctcccaactgcaagtgaaggattgataactgaaggcaatggattcagggatatacgaaacaccgataaattataaaaaaagcaatgtgtccgctgtttccgttaataatactattttcgtaactggcggattattcataaataactctaatagcacgatcgtggttaacaatatggaaaaacttgacatttataaagacaaacaatggtcgattatagaaatgcctatggctagggtatatcacggcatcgactcgacatttggaatgttatattttgccggaggtctatccgttaccgaacaatatggtaatttagagaaaaacaacgagatatcttgttacaatcctagaacgaataagtggtttgatatttcatatactatttataagatatccatatcatcattgtgtaaactaaataacgtcttctatgtatttagtaaggacattggatatgtggaaaagtatgatggtgcatggaagttagtacatgatcgtctccccgctataaaggcattatcaacttctccttattgattgaaaatgaaaatataaatagtttttatgtatagcagtattaccctatagttttattgcttactactaacatggatacagatgttacaaatgtagaagatatcataaatgaaatagatagagagaaagaagaaatactaaaaaatgtagaaattgaaaataataaaaacattaacaagaatcatcccaatgaatatattagagaagcactcgttattaataccagtagtaatagtgattccattgataaagaagttatagaatgtatcagtcacgatgtaggaatatagatcatatctactaatttttataatcgatacaaaacataaaaaacaactcgttattacatagcaggcatggaatccttcaagtattgttttgataacgatggcaagaaatggattatcggaaatactttatattctggtaattcaatactctataaggtcagaaaaaatttcactagttcgttctacaattacgtaatgaagatagatcacaaatcacacaagccattgttgtctgaaatacgattctatatatctgtattggatcctttgactatcgacaactggacacgggaacgtggtataaagtatttggctattccagatctgtatggaattggagaaaccgatgattatatgttcttcgttataaagaattcgggaagagtattcgccccaaaggatactgaatcagtcttcgaagcatgcgtcactatgataaacacgttagagtttatacactctcgaggatttacccatggaaaaatagaaccgaggaatatactgattagaaataaacgtctttcactaattgactattctagaactaacaaactatacaagagtggaaactcacatatagattacaacgaggacatgataacttcaggaaatatcaattatatgtgtgtagacaatcatcttggagcaacagtttcaagacgaggagatttagaaatgttgggatattgcatgatagaatggttcggtggcaaacttccatggaaaaacgaaagtagtataaaagtaataaaacaaaaaaaagaatataaaaaatttatagctactttctttgaggactgttttcctgaaggaaatgaacctctggaattagttagatatatagaattagtatacacgttagattattctcaaactcctaattatgacagactacgtagactgtttatacaagattgaaattatattcttttttttatagagtgtggtagtgttacggatatctaatattaatattagactatctctatcgcgctacacgaccaatatcgattactatggatatcttctatgaaaggagagaatgtattcatttctccagcgtcaatctcgtcagtattgacaatactgtattatggagctaatggatccactgctgaacagctatcaaaatatgtagaaacggaggagaacacggataaggttagcgctcagaatatctcattcaaatccatgaataaagtatatgggcgatattctgccgtgtttaaagattcctttttgagaaaaattggcgataagtttcaaactgttgacttcactgattgtcgcactatagatgcaatcaacaagtgtgtagatatctttactgaggggaaaatcaatccactattggatgaaccattgtctcctagcaattagtgccgtatactttaaagcaaaatggttgacgccattcgaaaaggaatttaccagtgattatcccttttacgtatctccgacggaaatggtagacgtaagtatgatgtctatgtacggcgagctatttaatcacgcatctgtaaaagaatcattcggcaacttttcaatcatagaactgccatatgttggagatactagtatgatggtcattcttccagacaagattgatggattagaatccatagaacaaaatctaacagatacaaattttaagaaatggtgtgactttatggatgctatgtttatagatgttcacattcccaagtttaaggtaacaggttcgtataatctggtggatactctagtaaagtcaggactgacagaggtgttcggttcaactggagattatagcaatatgtgtaatttagatgtgagtgtcgacgctatgatccacaaaacgtatatagatgtcaatgaagagtatacagaagcagctgcagcaacttctgtactagtggcagactgtgcatcaacagttacaaatgagttctgtgcagatcatccgttcatctatgtgattaggcatgttgatggcaaaattcttttcgttggtagatattgctctccaacaactaattgttaaccattttttttaaaaaaaatagaaaaaacatgtggtattagtgcaggtcgttgttcttccaattgcaattggtaagatgacggccaactttagtacccacgtcttttcaccacagcactgtggatgtgacagactgaccagtattgatgacgtcaaacaatgtttgactgaatatatttattggtcgtcctatgcataccgcaacaggcaatgcgctggacaattgtattccacactcctctcttttagagatgatgcggaattagtgttcatcgacattcgcgagctggtaaaaaatatgccgtgggatgatgtcaaagattgtgcagaaatcatccgttgttatataccggatgagcaaaaaaccatcagagagatttcggccatcatcggactttgtgcatatgctgctacttactggggaggtgaagaccatcccactagtaacagtctgaacgcattgtttgtgatgcttgagatgctaaattacgtggattataacatcatattccggcgtatgaattgatgagttgtacatcttgacattttctttcttctcttctccctcttctccctttcccagaaacaaactttttttacccactataaaataaaatgagtatactacctattatatttcttcctatatttttttattcttcattcgttcagacttttaacgcgcctgaatgtatcgacaaagggcaatattttgcatcattcatggagttagaaaacgagccagtaatcttaccatgtcctcaaataaatacgctatcatccggatataatatattagatattttatgggaaaaacgaggagcggataatgatagaattataccgatagataatggtagcaatatgctaattctgaacccgacacaatcagactctggtatttatatatgcattaccacgaacgaaacctactgtgacatgatgtcgttaaatttgacaatcgtgtctgtctcagaatcaaatatagatcttatctcgtatccacaaatagtaaatgagagatctactggcgaaatggtatgtcccaatattaatgcatttattgctagtaacgtaaacgcagatattatatggagcggacatcgacgccttagaaataagagacttaaacaacggacacctggaattattaccatagaagatgttagaaaaaatgatgctggttattatacatgtgttttagaatatatatacagaggtaaaacatataacgtaaccagaattgtaaaattagaggtacgggataaaataataccttctactatgcaattaccagatggcattgtaacttcaataggtagtaatttgactattgcatgcagagtatcgttgagacctcccacaacggacaccgacgtcttttggataagtaatggtatgtattacgaagaagatgatggggacggaaacggtagaataagtgtagcaaataaaatctatatgaccgataagagacgtgttattacatcccggttaaacattaatcctgtcaaggaagaagatgctacaacgtttacgtgtatggcgtttactattcctagcatcagcaaaacagttactgttagtataacgtgaatgtatgttgttacatttccatgtcaattgagtttataagaatttttatacattatcttccaacaagcaattgacgaacgtattgctatgattaactcccacgatactatgcatattattaatcattaacttgcagactatacctagagctattttgacatactcgtgttcttgtgtaattgcagtatctatattattaaagtacgtaaatctagctatagttttattatttaattttagataatataccgtctccttatttttaaaaattgttacatcctttattaaatcatgaatgggaatttctatgtcatcgttagtatattgtgaacaacaagagcagatatctataggaaagggtggaatgcgatacattgatctatgtagttttaaaacacacgcaaactttgaagaatttatataaatcattccatcgatacatccttctatgttgagatgtatatatccaggaattcgtttattaatatcgggaaatgtataaactaaaacattgcccgaaagcggtgcctctatctgcgttatatccgttcttaacttacaaaatgtaaccaatacctttgcatgacttgttttgttcggcaacgttagtttaaacttgacgaatggattaattacaatagcatgatccgcgcatctattaagtttttttactttaacgcccttgtatgtttttacagagactttatctaaatttctagtgcttgtatgtgttataaatataacgggatatagaaccgaatcacctaccttagatacccaattacattttatcagatccagataataaacaaattttgtcgccctaactaattctatattgttatatattttacaattggttatgatatcatgtaataacttggagtctaacgcgcatcgtcgtacgtttatacaattgtgatttagtgtagtatatctacacatgtatttttccgcactatagtattctggactagtgataaaactatcgttatatctgtcttcaatgaactcatcgagatattgctctctgtcatattcatacacctgcataaactttctagacatcttacaatccgtgttattttaggatcatatttacatatttacgggtatatcaaagatgttagattagttaatgggaatcgtctataataatgaatattaaacaattatatgaggacttttaccacaaagcatcataaaaatgagtcgtcgtctgatttatgttttaaatatcaaccgcgaatcaactcataaaatacaagagaatgaaatatatacatattttagtcattgcaatatagaccatacttctacagaacttgattttgtagttaaaaactatgatctaaacagacgacaacctgtaactgggtatactgcactacactgctatttgtataataattactttacaaacgatgtactgaagatattattaaatcatggagtggatgtaacgatgaaaaccagtagcggacgtatgcctgtttatatattgcttactagatgttgcaatatttcacatgatgtagtgatagatatgatagacaaagataaaaaccacttatcgcatagagactattccaacctactactagagtatataaaatctcgttacatgttattgaaggaagaggatatcgatgagaacatagtatccactttattagataagggaatcgatcctaactttaaacaagacggatatacagcgttacattattattatttgtgtctcgcacacgtttataaaccaggtgagtgtagaaaaccgataacgataaaaaaggccaagcgaattatttctttgtttatacaacatggagctaatctaaacgcgttagataattgtggtaatacaccattccatttgtatcttagtattgaaatgtgtaataatattcatatgactaaaatgctgttgacttttaatccgaatttcgaaatatgtaataatcatggattaacgcctatactatgttatataacttccgactacatacaacacgatattcttgttatgttaatacatcactatgaaacaaatgttggagaaatgccgatagatgagcgtcgtatgatcgtattcgagtttatcaaaacatattctacacgtccggcagattcgataacttatttgatgaataggtttaaaaatataaatatttatacccgctatgaaggaaagacattattacacgtagcatgtgaatataataatacacaagtaatagattatcttatacgtatcaacggagatataaatgcgttaaccgacaataacaaacacgctacacaactcattatagataacaaagaaaattccccatataccattaattgtttactgtatatacttagatatattgtagataagaatgtgataagatcgttggtggatcaacttccatctctacctatctttcgtcgcttatcatactagtcatatcctaaatgttgatcatattccaccaaatgattgtgaaagagattgagattaaatcgtctaacaaacaattagtttttatgacattaacatataataaataaattaatcattattgacttaacgatgacgaaagttatcatcatcttaggattcttgattattaatacaaattcattgtctatgaaatgtgaacaaggtgtctcatattataattcacaagaattaaagtgttgtaaactatgtaagccaggaacatattcagatcatcgatgtgataaatacagcgataccatttgtggacattgtccgagtgacacattcacgtcaatatataatcgttctccttggtgtcatagttgtagaggtccatgtggtactaatcgagtagaggtcacaccttgtacacctaccacaaatagaatctgtcattgtgactcgaatagttattgtctccttaaagcttctgatggtaactgtgttacatgtgctcctaaaacaaaatgtggtcgtgggtatggaaagaaaggagaagatgaaatgggtaataccatttgtaagaaatgtcggaagggtacttattcagatattgtatctgactctgatcaatgtaaaccaatgacaagataagacttactcgcatctactggatagacataaaatatcctcctcgtaataatgaaatataaatatacactaattattaatatcaataacaatcgagtattaatatataggtcatttttaaatcccttttgggttccgtcccaaacggcgtttcggtctgcgtcgccgccatggccatgccgagcctctccgcgtgctcctccatcgaggacgacttcaactatggcagctcggtggcgtctgccagcgtgcacatacgaatggcatttctaagaaaagtctacggtatcctttgtctacaatttcttttaacaacggcaacaactgcagtatttttatactttgactgcatgcggacatttatacaagggagtcctgttctaatattggcatcaatgttcggatctataggcttgattttcgcattgactttacacagacataaacatcccctgaatctgtacctgctttgtggatttacactgtcggaatctctaacgctggcctctgttgttactttctatgatgtgcatgtcgttatgcaagctttcatgctgactactgcagcgtttcttgctctgactacatatactctacaatcaaagagagatttcagtaaacttggagcaggattgtttgctgctttgtggattttaattttgtcaggactcttggggatatttgtgcaaaatgagacagtgaagctggtcctgtctgcttttggggcccttgtattctgtggattcattatctatgacacgcactcactaatacataagctctcgcctgaagagtatgtgttagcctctatcaatctctacttggatatcatcaatctgttcttgcatctgttgcagcttttggaagtatctaataagaaataaagtttaaaatagaattaataaaaacatataggtcattttttaaacatggattggaaaccaaggtagttagttaatacacacaagatatatttttttcacatcatccacccatgggtaacaccaaggttgttagttaataatatacaagatattttttctcactctgatccatgtaaaccaaggacgagataagacactctcattcctcatccacaaccccattaaaaaaatggaaattaaagccctctattagcataaacggctacaggtctaccatcaggttaaccttcgtctaccttcacaatggcctctccttgtgcccagttcagaccctgtcattgccactccctgaataccgtggccgacgtcagacattgtctgactgaatacatcctgtgggtttctcatagatggacccatagagaaactgcagggcctctctacaggcttctcatctctttcagaactgatgcaacggagctctttggtggtgagttgaaggagttctcggattcacttccgtgggacaatatcgacaattgcgtggagatcattaaatgtttcatcagaaatgactccatgaaaaccgccgaagaacttcgtgcaatcattggactttgtactcaatcagctatcgtctctggaagagtcttcaacgataagtatatcgacatactacttatgctgcgaaagattctgaacgagaacgactatctcaccctcttggatcatatccgcactgctaaatactaaatctccttcatgctctctcactacactttttatcatcttatgaggaatgattgccttcgtgaaataggaataattagcaccagaatagctatggattgcacatgtattctatgtcgtctactggatgaagatgtgacgtacaaaaaaataaaactagaaattgaaacgtgtcacaacttatcaaaacatatagatagacgaggaaacaatgcgctacattgttacgtctccaataaatgcgatacagacattaagattgttctctcgcggagtcgagagactttgtagaaacaacgaaggattaactccgctaggagcatacagtaagcatagatacgtaaaatctcagattgtgcatctactgatatccagctattcaaattcctctaacgaactcaagtcgaatataaatgatttcgatctgtattcgtataatatcgacttacgtctgctaaaatacctaattgtggataaacggatacgtccgtccaagaatacgaattatgcaatcaatggtctcggattggtggatatatacgtaacgacgcctaatccgagaccagaagtattgctatggcttcttaaatcagaatgttacagcaccggttacgtatttcgtacctgtatgtacgacagtgatatgtgtaagaactctcttcattactatatatcgtctcatagagaatctcaatctctatccaaggatgtaattaaatgtttgatcaataacaatgtttccatccatggcagagacgaaggaggatctttacccatccaatactactggtctttctcaaccatagatatagagattgttaaattattattaataaaggatgtggacacgtgtagagtatacgacgtcagccctatattagaggcgtattatctaaacaagcgatttagagtaaccccatataatgtagacatggaaatcgttaatcttcttattgagagacgtcatactcttgtcgacgtaatgcgtagtattacttcgtacgattccagagaatataaccactacatcatcgataacattctaaagagatttagacaacaggatgtacaagccatgttgataaactacttacattacggcgatatggtaagtatacctatcattcaatgcatgttagataacggagcaaccatggataagacgacggacaacaactatcctctacacgactactttgttaataataatctcgtcgatgtaaacgtcgtaaggtttatcgtggaaaatatggacacgcggctgtaaatcacatatcgaacaatggccgtctatgtatgtacggtctgatattatcgagatttaataattgcgggtatcactgttatgaaaccatactgatagatgtatttgatatactaagcaagtacatggatgatatagatatgatcgataactctactatattacgcggtcgatgtcaataatatacaatttgcaaagcggttattggaatatggagcgagtgtcacaacatcacgctcgataatcaatacggccatccagaaaagcagttaccaaagagaaaacaaaacgaggatagttgatttattactgagttaccatcccactctagagactatgattgacgcatttaatagagatatacgctatctatatcctgaaccattatcggcatgtatcagatacgccttaatcctagatgatgattttccttctaaagtaaagtatgatatcgccggtcgtcataaggaactaaagcgctatagagtagacattaatagaatgaagaatgcctacatatcaggcgtctccatgtttgatatattatttaaacgaagcaaacgccacagattgagatacgcaaagaatccgacatcaaatggtacaaaaaagaactaacgtccatcattacagaaactgtaaagaacaatgagaggatcgactccatagtggacaacattaatacagacgataacttgatttcgaaattacccatggagatactttattactccattaaataatttatcatggagcgataatgtcctgtttcatttgtttccatgacatattacaaaatcgattccgtccaagatgataaaaacatttaccggcatcataaacacggagtttattttatatgtctcgcataaacattactaaaaaaatatattgttcggttttctttcacatctttaattatgaaaaagtaaatcattatgagatggacgagattgtacgcatcgttcgcgacagtatgtggtacatacctaacgtatttatggacgacggtaagaatgaaggtcacgtttctgtcaacaatgtctgtcatatgtattttacgttctttgatgtggatacatcgtctcatctgtttaagctagttattaaacactgcgatctgaataaacgaggtaactctccattacattgctatacgatgaatacacgatttaatccatctgtattaaagatattgttacaccacggcatgcgtaactttgatagcaaggatgaccactatcaatcgataacaagatctttgatatactaacggacaccattgatgactttagtaaatcatccgatctattgctgtgttatcttagatataaattcaatgggagcttaaactattacgttctgtacaaaggatccgaccctaattgcgccgacgaggatgaactcacttctcttcattactactgtaaacacatatccacgttctacgaaagcaattattacaagttaagtcacactaagatgcgagccgagaagcgattcatctacgcgataatagattatggagcaaacattaacgcggttacacacttaccttcaacagtataccaaacatagtcctcgtgtggtgtatgctcttttatctcgaggagccgatacgaggatacgtaataatcttgattgtacacccatcatggaacgattgtgcaacaggtcatattctcataatgttactcaattggcacgaacaaaaggaagaaggacaacatctactttatctattcataaaacataatcaaggatacactctcaatatactacggtatctattagataggttcgacattcagaaagacgaatactataataccgcctttcaaaattgtaacaacaatgttgcctcatacatcggatacgacatcaaccttccgactaaagacggtattcgacttggtgtttgaaaacagaaacatcatatacaaggcggatgttgtgaatgacatcatccaccacagactgaaagtatctctacctatgattaaatcgttgttctacaagatgtctctccctacgacgattactacgtaaaaaagatactagcctactgcctattaagggacgagtcattcgcggaactacatagtaaattctgtttaaacgaggactataaaagtgtatttatgaaaaatatatcattcgataagatagattccatcatcgtgacataagtcgcctcaaagagattcgaatctccgacaccgacctgtatacggtatcacagctatcttaaagccatacattcagacagtcacatttcatttcccatgtacgacgatctcatagaacagtgccatctatcgaaactcgtcgacaaagcactcaataaattagagtctaccatcgatggccaatctagactatcgtatttgcctccggaaattatgcgcaatatcatctaaacagtatgttgtacggaaagaaccattacaaatattatccatgattggagaagtaggaaacaggaacaagacaacgattactacattattaaattatgaagtccgtattatactcgtatatattgtttctctcatgtataataataaacggaagagatatagcaccgcatgcaccatccgatggaaagtgtaaagacaacgaatacaaacgccataatctgtgtccgggaacatacgcttccagattatgcgatagcaagactaacacacgatgtacgccgtgtggttcgggtaccttcacatctcgcaataatcatttacccgcttgtctaagttgtaacggaagacgcgatcgtgtaacacgactcacaatagaatctgtgaatgctctcccggatattattgtcttctcaaaggatcatccggatgcaaggcatgtgtttcccaaacaaaatgtggaataggatacggagtatccggagacgtcatctgttctccgtgtggtctcggaacatattctcacaccgtctcttccgcagataaatgcgaacccgtacccagaaatacgtttaactatatcgatgtggaaattaacctgtatccagttaacgacacgtcgtgtactcggacgaccactaccggtctcagcgaatccatctcaacgtcggaactaactattactatgaatcataaagactgtaatcccgtatttcgtgatggatacttctccgttcttaataaggtagcgacttcaggtttctttacaggagaaaggtgtgcactctgaatttcgagattaaatgcaataacaaagattcttcctccaaacagttaacgaaagcaaagaatgatactatcatgccgcattcggagacagtaactctagtgggcgacatctatatactatatagtaataccaatactcaagactacgaaactgatacaatctcttatcatgtgggtaatgttctcgatgtcgatagccatatgcccggtagttgcgatatacataaactgatcactaattccaaacccacccactttttatagtaagtttttcacccataaataataaatacaataattaatttctcgtaaaagtagaaaatatattctaatttattgcacggtaaggaagtagaatcataaagaacagtactcaatcaatagcaattatgaaacaatatatcgtactggcatgcatgtgcctggcggcagctgctatgcctgccagtcttcagcaatcatcctcatcctcctcctcgtgtacggaagaagaaaacaaacatcatatgggaatcgatgttattatcaaagtcacaaagcaagaccaaacaccgaccaatgataagatttgccaatccgtaacggaaattacagagtccgagtcagatccagatcccgaggtggaatcagaagatgattccacatcagtcgaggatgtagatcctcctaccacttattactccatcatcggtggaggtctgagaatgaactttggattcaccaaatgtcctcagattaaatccatctcagaatccgctgatggaaacacagtgaatgctagattgtccagcgtgtccccaggacaaggtaaggactctcccgcgatcactcatgaagaagctcttgctatgatcaaagactgtgaagtgtctatcgacatcagatgtagcgaagaagagaaagacagcgacatcaagacccatccagtactcgggtctaacatctctcataagaaagtgagttacgaagatatcatcggttcaacgatcgtcgatacaaaatgcgtcaagaatctagagtttagcgttcgtatcggagacatgtgcaaggaatcatctgaacttgaggtcaaggatggattcaagtatgtcgacggatcggcatctgaaggtgcaaccgatgatacttcactcatcgattcaacaaaactcaaagcgtgtgtctgaatcgataactctattcatctgaaattggatgagtagggttaatcgaacgattcaggcacaccacgaattaaaaaagtgtaccggacactatattccggtttgcaaaacaaaaatgttcttaactacattcacaaaaagttacctctcgcgacttcttctttttctgtctcaatagtgtgatacgattatgacactattcctattcctattcctatttcctttcagagtatcacaaaaatattaaacctctttctgatggtctcataaaaaaagttttacaaaaatatttttattctctttctctctttgatggtctcataaaaaaagttttacaaaaatatttttattctctttctctctttgatggtctcataaaaaaagttttacaaaaatatttttattctctttctctctttgatggtctcataaaaaaagttttacaaaaatatttttattctctttctctctttgatggtctcataaaaaaagttttacaaaaatatttttattctctttctctctttgatggtctcataaaaaaagttttacaaaaatatttttattctctttctctctttgatggtctcataaaaaaagttttacaaaaatatttttattctctttctctctttgatggtctcataaaaaaagttttacaaaaatatttttattctctttctctctttgatggtctcataaaaaaagttttacaaaaatatttttattctctttct

SEQ ID NO: 8 - DNA, 188863 bp, Vaccinia virus
  LIVP 5.1.1
cgattaaaactttttttatgagaccatcaaagagagaaagagaataaaaatatttttgtaaaactttttttatgagaccatcaaagagagaaagagaataaaaatatttttgtaaaactttttttatgagaccatcaaagagagaaagagaataaaaatatttttgtaaaactttttttatgagaccatcaaagagagaaagagaataaaaatatttttgtaaaactttttttatgagaccatcaaagagagaaagagaataaaaatatttttgtaaaactttttttatgagaccatcaaagagagaaagagaataaaaatatttttgtaaaactttttttatgagaccatcaaagagagaaagagaataaaaatatttttgtaaaactttttttatgagaccatcaaagagagaaagagaataaaaatatttttgtaaaactttttttatgagaccatcaaagagagaaagagaataaaaatatttttgtaaaactttttttatgagaccatcaaagagagaaagagaataaaaatatttttgtaaaactttttttatgagaccatcaaagagagaaagagaataaaaatatttttgtaaaactttttttatgagaccatcaaagagagaaagagaataaaaatatttttgtaaaactttttttatgagaccatcaaagagagaaagagaataaaaatatttttgtaaaactttttttatgagaccatcaaagagagaaagagaataaaaatatttttgtaaaactttttttatgagaccatcaaagagagaaagagaataaaaatatttttgtaaaactttttttatgagaccatcaaagagagaaagagaataaaaatatttttgtaaaactttttttatgagaccatcaaagagagaaagagaataaaaatatttttgtaaaactttttttatgagaccatcaaagagagaaagagaataaaaatatttttgtaaaactttttttatgagaccatcagaaagaggtttaatatttttgtgatactctgaaaggaaataggaataggaataggaatagtgtcataatcgtatcacactattgagacagaaaaagaagaagtcgcgagaggtaactttttgtgaatgtagttaagaacatttttgttttgcaaaccggaatatagtgtccggtacacttttttaattcgtggtgtgcctgaatcgttcgattaaccctactcatccaatttcagatgaatagagttatcgattcagacacacgctttgagttttgttgaatcgatgagtgaagtatcatcggttgcaccttcagatgccgatccgtcgacatacttgaatccatccttgacctcaagttcagatgattccttgcacatgtctccgatacgaacgctaaactctagattcttgacgcattttgtatcgacgatcgttgaaccgatgatatcttcgtaactcactttcttatgagagatgttagacccgagtactggatgggtcttgatgtcgctgtctttctcttcttcgctacatctgatgtcgatagacacttcacagtctttgatcatagcaagagcttcttcatgagtgatcgcgggagagtccttaccttgtcctggggacacgctggacaatctagcattcactgtgtttccatcagcggattctgagatggatttaatctgaggacatttggtgaatccaaagttcattctcagacctccaccgatgatggagtaataagtggtaggaggatctacatcctcgactgatgtggaatcatcttctgattccacctcgggatctggatctgactcggactctgtaatttccgttacggattggcaaatcttatcattggtcggtgtttggtcttgctttgtgactttgataataacatcgattcccatatgatgtttgttttcttcttccgtacacgaggaggaggatgaggatgattgctgaagactggcaggcatagcagctgccgccaggcacatgcatgccaggacgatatattgtttcataattgctattgattgagtactgttctttatgattctacttccttaccgtgcaataaattagaatatattttctacttttacgagaaattaattattgtatttattatttatgggtgaaaaacttactataaaaagtgggtgggtttggaattagtgatcagtttatgtatatcgcaactaccgggcatatggctatcgacatcgagaacattacccacatgataagagattgtatcagtttcgtagtcttgagtattggtattactatatagtatatagatgtcgcccactagagttactgtctccgaatgcggcatgatagtatcattctttgctttcgttaactgtttggaggaagaatctttgttattgcatttaatctcgaaattcagagtgcacacctttctcctgtaaagaatcctgaagttgctaccttattaagaacggagaagtatccatcacgaaagacgggattacagtctttatgattcatagtaatagttagttccgacgttgagatggattcgctgagaccggtagtggtcgtccgagtacacgacgtgtcgttaactggatacaggttaatttccacatcgatatagttaaacgtatttctgggtacgggttcgcatttatctgcggaagagacggtgtgagaatatgttccgagaccacacggagaacagatgacgtctccggatactccgtatcctattccacattttgtttgggaaacacatgccttgcatccggatgatcctttgagaagacaataatatccgggagagcattcacagattctattgtgagtcgtgttacacgatcgcgtcttccgttacaacttagacaagcgggtaaatgattattgcgagatgtgaaggtacccgaaccacacggcgtacatcgtgtgttagtcttgctatcgcataatctggaagcgtatgttcccggacacaaattatggcgtttgtattcgttgtctttacactttccatcggatggtgcatgcggtgctatatctcttccgtttattattatacatgagagaaacaatatatacgagtataatacggacttcatgatttaataatgtagtaatcgttgtcttgttcctgtttcctacttctccaatcatatagatattttctttctatcatggataatatttgtaatggttctttccgtacaacatactgtttagatgatattgcgcataatttccggaggcaaatacgatagtctagattgaccgatggtagactctaatttattgagtgctttgtcgacgagtttacttttacgctccatcgatagatggcactgttctatgagatcgtcgtacatgggaaatgaaatgtgactgtctgaatgtatggctttaagatagctgtgataccgtatacaggtcggtgtcggagattcgaatctctttgaggcgacttatgtcacgatgatggaatctatcttatcgaatgatatatttttcataaatacacttttatagtcctcgtttaaacagaatttactatgtagttccgcgaatgactcgtcccttaataggcagtaggctagtatcttttttacgtagtaatcgtcgtagggagagacatcttgtagaacaacgatttaatcataggtagagatactttcagtctgtggtggatgatgtcattcacaacatccgccttgtatatgatgtttctgttttcaaacaccaagtcgaataccgtctttagtcggaaggttgatgtcgtatccgatgtatgaggcaacattgttgttacaattttgaaaggcggtattatagtattcgtctttctgaatgtcgaacctatctaatagataccgtagtatattgagagtgtatccttgattatgttttatgaatagataaagtagatgttgtccttcttccttttgttcgtgccaattgagtaacattatgagaatatgacctgttgcacaatcgttccatgatgggtgtacaatcaagattattacgtatcctcgtatcggctcctcgagataaaagagcatacaccacacgaggactatgtttggtatactgttgaaggtaagtgtgtaaccgcgttaatgtttgctccataatctattatcgcgtagatgaatcgcttctcggctcgcatcttagtgtgacttaacttgtaataattgctttcgtagaacgtggatatgtgtttacagtagtaatgaagagaagtgagttcatcctcgtcggcgcaattagggtcggatcctttgtacagaacgtaatagtttaagctcccattgaatttatatctaagataacacagcaatagatcggatgatttactaaagtcatcaatggtgtccgttagtatatcaaagatcttgttatcgattgatagtggtcatccttgctatcaaagttacgcatgccgtggtgtaacaatatctttaatacagatggattaaatcgtgtattcatcgtatagcaatgtaatggagagttacctcgtttattcagatcgcagtgtttaataactagcttaaacagatgagacgatgtatccacatcaaagaacgtaaaatacatatgacagacattgttgacagaaacgtgaccttcattcttaccgtcgtccataaatacgttaggtatgtaccacatactgtcgcgaacgatgcgtacaatctcgtccatctcataatgatttactttttcataattaaagatgtgaaagaaaaacagaacaatatatttttttagtaatgtttatgcgagacatataaaataaactccgtgtttatgatgccggtaaatgtttttatcatcttggacggaatcgattttgtaatatgtcatggaaacaaatgaaacaggacattatcgctccatgataaattatttaatggagtaataaagtatctccatgggtaatttcgaaatcaagttatcgtctgtattaatgttgtccactatggagtcgatcctctcattgttctttacagtttctgtaatgatggacgttagttcttttttgtaccatttgatgtcggattctttgcgtatctcaatttgtggcgtttgcttcgtttaaagaatatatcaaacatggagacgcctgatatgtagacattcttcattctattaatgtctactctatagcgctttagttccttatgacgaccggagatatcatactttactttagaaggaaaatcatcatctaggattaaggcgtatctgatacaggcgaataatggttcaggatatagatagcgtatatctctattaaatgcgtcaatcatagtctctagagtgggatggtagctaagtaataaatcaactatcctcgttttgttttctctttggtaactgcttttctggatggccgtattgattatcgagcgtgacactcgctccatattccaataaccgctttgcaaattgtatattattgacatcgaccgcgtaatatagtagagttatcgatcatatctatatcatccatgtacttgcttagtatatcaaatacatctatcagtatggtttcataacagtgatacccgcaattattaaatctcgataatatcagaccgtacatacatagacggccattgttagatatgtgatttacagccgcgtgtccatattttccacgataaaccttacgacgtttacatcgacgagattattattaacaaagtagtcgtgtagaggatagttgttgtccgtcgtcttatccatggttgctccgttatccaacatgcattgaatgataggtatacttaccatatcgccgtaatgtaagtagtttatcaacatggcttgtacatcctgttgtctaaatctctttagaatgttatcgatgatgtagtggttatattctctggaatcgtacgaagtaatactacgcattacgtcgacaagagtatgacgtctctcaataagaagattaacgatttccatgtctacattatatggggttactctaaatcgcttgtttagataatacgcctctaatatagggctgacgtcgtatactctacacgtgtccacatcctttattaataatttaacaatctctatatctatggttgagcaagaccagtagtattggatgggtaaagatcctccttcgtctctgccatggatggaaacattgttatcgatcaaacatttaattacatccttggatagagattgagattctctatgagacgatatatagtaatgaagagagttcttacacatatcactgtcgtacatacaggtacgaaatacgtaaccggtgctgtaacattctgatttaagaagccatagcaatacttctggtctcggattaggcgtcgttacgtatatatccaccaatccgagaccattgattgcataattcgtattcttggacggacgtatccgtttatccacaattaggtattttagcagacgtaagtcgatattatccgaatacagatcgaaatcatttatattcgacttgagttcgttagaggaattcgaatagctggatatcagtagatgcacaatctgagatttgacgtatctatgcttactgtatgctcctagcggagttaatccttcgttgtttctacaaagtctctcgactccgcgagagagtaacagccgaacaatcttaatgtctgtatcgcatttattgaagacgtaacaatgtagcgcattgtttcctcgtctatctatatgttttgataagttgtgacacgtttcaatctctggttttatttttttgtacgtcacatcttcatccagtagacgacatagaatagtgcactctctaccacaataatccatagctattctggtgctaattattcctatttcacgaaggcaatcattcctcataagatgataaaaagtgtagtgagagagcatgaaggagatttagtatttagcagtgcggatatgatccaagagggtgagatagtcgttctcgttcagaatctttcgcagcataagtagtatgtcgatatacttatcgttgaagactctttataaaagtctatttgtttatatttattgcggatagcagtatttccctataaaaagtatacgtcctgtggtgtctttaatcatgtacatgaatggatggtttatgtagaccttcgtacgatataccatcgaaaagttaatcgtaaatactcctgtaacggccgatgcttctgtatactcctcattaacatctataaacgtcgtatgtagaaatttttctacagtgatagtttcattacacatcttgctaaaatctgcataatatccgaatatattagtaagtcctaaattttctaaaatcggtaccagattatacggttctgtcatttccactttaaactttggcatatacaagtctatacttttagtagataacataccacaccattttttaaatttttcatctgttatatttttttctatgttatatataccttctatgtcgtccggtagtataattaccatactagagtttccctcgtatggaatatcgataatagagaatcctccgaataattcattaatatgtacatattgcaagttattctcggtacccaccatcatatcaacgctggtaactatattcttagaaatataaaacttgtctgtatatgtaagatgtttagaaaatggatatttccacattgctttaaaatggacggcgctaacaactgtcatacgagtattaatggatagcggactagtcaataaggaattaattttaccatttgtcattgtcttaacccattcgttgattagttcctttgtttggttagcattattaaagtttacagtttgaaaatcgtcttttattttttgtaggaaggaggcgtggaactcgatactatcgctaccgtatattttatttgcggtagctagtgtcgcacaatacggaatatctacctccatgtcatcattattgtcatcgggtgtattctcattcatattctctatatattttgatagttgttcagctgtagaaccagctgctccatgatttagaatagataaagtagataaaatggaaactggagaaatcaaaacattttcatcagggtgttttaagattagttctttaaagatatccatggtatagacctaacgataacgatatatatcataaataaataatgttaaatttcaatttatgtttgtaccccgtattcatacttaacaaattggtattgcgtacacaatcaatcatattacataccattaataatgcaagcataaaaaattgttagtagatgtttctaaatataggttccgtaagcaaagaatataagaatgaagcggtaatgataaaatcaatcgttatctaaaatgatcatactcatttattttattctattatattaacacatacatttttaacagcaacacattcaatattgtattgttatttttatattatttacacaattaacaatatattattagtttatattactgaattaataatataaaattcccaatcttgtcataaacacacactgagaaacagcataaacacagaatccatcaaaaatgttgataaattatctgatgttgttgttcgctgctatgataatcagatcattcgccgatagtggtaacgctatcgaaacgacattgccagaaattacaaacgctacaacagatattccagctatcagattatgcggtccagagggagatggatattgtttacacggtgactgtatccacgctagagatattgacggtatgtattgtagatgctctcatggttatacaggcattagatgtcagcatgtagtattagtagactatcaacgttcagaaaacccaaacactacaacgtcatatatcccatctcccggtattatgcttgtattagtaggcattattatgtgttgtctattatctgtttataggttcactcgacgaactaaactacctatacaagatatggttgtgccataatttttataaatttttttatgagtatttttacaaaaatgtataaagtgtatgtcttatgtatatttataaaaatgctaagtatgcgatgtatctatgttatttgtatttatctaaacaatacctctacctctagatattatacaaaaattttttatttcggcatattaaagtaaaatctagttaccttgaaaatgaatacagtgggtggttccgtatcaccagtaagaacataatagtcaaatacagtatccgattgagattttgcatacaatactagtctagaaagaaatttgtaatcatcttctgtgacgggagtccatatatctgtatcatcgtctagtttatcagtgtcccatgctatattcctgttatcatcattagttaatgaaaataactctcgtgcttcagaaaagtcaaatattgtatccatacatacatctccaaaactatcgcttatacgtttatctttaacgatacctatacctagatggttatttactaacagacattttccagatctattgactataactcctatagtttccacatcaaccaagtaatgatcatctattgttatataacaataacataactcttttccatttttatcagtatgtatatctatatcaacgtcgtcgttgtagtgaatagtagtcattgatctattatatgaaacggatatgtctagaacggcaattgttttacgtccagttaacactttcgttgatttaaagtctagagtctttgcaaacataatatccttatccgactttatatttcctgtagggtggtataattttattttgcctccacatatcggtgtttccaaatatattactagacaatattccatatagttattagttaagggtacccaattagaacacgtacgcttattatcatcatttggatcgtatttcataaaagttattgtgttatcgatgtcaacacattctacattttttaatcgtctatatagtatttttctgatattttctataatatcagaattgtcttccatcggaagttgtatactatcggaatcagttacatgtttaaataattctctgatgtcattccttatacaatcaaattcattattaaacagtttaatagtctgtagacctttatcgtcgtaaatatccattgtcttattagttacgcttatttttatgtgtttttacgttgctttattatattttataagaatgattgtttgacgaatcacgagaactattaagacacattattaggtatatattataaaaaagtttttgattacgatgttataagaggaaagaggacacattaacatcatacatcaattaactacattcttataacatcgtaatcaaaagaattgcaattttgatgtataacaactgtcaatgggttatggaattgtatattacatattatacggtatgttggtaacgacaaataccggtcggtaattgtctgccggtgtaatagaattatatatatctatctattacaccggccttgtatacataataataagttgtggtagtatgatctccatatttataatttaggactttgtattcagtatttttggaatcataaaaaataaaaaaaagttttactaatttaaaatttaaaaagtatttacatttttttcactgtttagtcgcggatatggaattcgatcctgccaaaatcaatacatcatctatagatcatgtaacaatattacaatacatagatgaaccaaatgatataagactaacagtatgcattatccgaaatattatatcaatatcacaaaaataaatacacatttggctaatcaatttcgggcttggaaaaaacgtatcgccggaagggactatatgactaacttatctagagatacaggaatacaacaatcaaaacttactgaaactatacgtaactgtcaaaaaaatagaaacatatatggtctatatatacactacaatttagttattaattggataaccgatgtgattatcaatcaatattaagagggttggtaaattggtacatagctaataatacctatacacccaataatacaacaaccatttctgagttggatatcatcaaaatactaaataaatacgaggacgtgtatagagtaagtaaagaaaaagaatgtggaatttgctatgaagttgtttactcaaaacgatagatactttggtttattggattcgtgtactcatatattttgcataacatgcatcaatatatggcatagaacacgaagagaaaccggtgcgtcggataattgtcctatatgccgtacccgttttagaaacataacaatgagcaagttctataagctagttaactaataaataaaaagtttaatttgttgacgacgtatgtcgttattttttctcgtataaaagattaaattcaattcaattcgttgtttctaatataatctgccgtattggatggattctcaagacaattgcatttagattatattatcatgaataaaaatagtagcacacaactacttcagcaaacattctttttataaatgccatctagcgtagcgaggacacaagtgaacctataattatcaaatttattagtatcggttacatgaaggactttacgtagagtgacgattccactatctgtggtacgaacggtttcatcttctttgatgccatcacccagatgttctataaacttggtatcctcgtccgatttcatatcctttgccaaccaatacatatagctaaactcaggcatatgttccacacatcctgaacaatgaaattctccagaagatgttacaatgtctagatttggacatttggtttcaaccgcgttaacatatgagtgaacacacccatacatgaaagcgatgagaaataggattctcatcttgccaaaatatcactagaaaaaatttatttatcagttttaaaggtataaaaaatacttattgttgctcgaatattttgtatttgatggtatacggaagattagaaatgtaggtattatcatcaactgattctatggttttatgtattctatcatgtttcactattgcgttggaaataatatcatatgcttccacatatattttattttgttttaactcataatactcacgtaattctggattattggcatatctatgaataattttagctccatgatcagtaaatattaatgagaacatagtattaccacctaccattatttttttcatctcattcaattcttaattgcaaagatctatataatcattatagcgttgacttatggactctggaatcttagacgatgtacagtcatctataatcatggcatatttaatacattgttttatagcatagtcgttatctacgatgttagatatttctctcaatgaatcaatcacacaatctaatgtaggtttatgacataatagcattttcagcagttcaatgtttttagattcgttgatggcaatggctatacatgtatatccgttatttgatctaatgttgacatctgaaccggattctagcagtaaagatactagagattgtttattatatctaacagccttgtgaagaagtgtttctcctcgtttgtcaatcatgttaatgtctttaagataaggtaggcaaatgtttatagtactaagaattgggcaagcataagacatgtcacaaagacccttttttgtatgtataagtgtaaaaattataacatccatagttggatttacataggtgtccaatcgggatctctccatcatcgagataattgatggcatctcccttccttttttagtagatatttcatcgtgtaagaatcaatattaatatttctaaagtatccgtgtatagcctctttatttaccacagctccatattccactagagggatatcgccgaatgtcatatactcaattagtatatgttggaggacatccgagttcattgttttcaatatcaaagagatggtttccttatcatttctccatagtggtacaatactacacattattccgtgcggctttccattttccaaaaacaatttgaccaaatctaaatctacatctttattgtatctataatcactatttagataatcagccataattcctcgagtgcaacatgttagatcgtctatatatgaataagcagtgttatctattcctttcattaacaatttaacgatgtctatatctatatgagatgacttaatataatattgaagagctgtacaatagtttttatctataaaagacggcttgattccgtgattaattagacatttaacaacttccggacgcacatatgctctcgtatccgactctgaatacagatgagagatgatatacagatgcaatacggtaccgcaatttcgtagttgataatcatcatacgcgtatcagtactcgtcctcataaagaacactgcagccattttctatgaacaaatcaataattttagaaacaggatcattgtcattacataattttctataactgaacgatggttttcacatttaacactcaagtcaaatccatgttctaccaacacctttatcaagtcaacgtctacatttttggatttcatatagctgaatatattaaagttatttatgttgctaaatccagtggcttctagtagagccatcgctatatccttattaactttaacatgtctactatttgtgtattcttctaatggggtaagctgtctccaatttttgcgtaatggattagtgccactgtctagtagtagtttgacgacctcgacattattacaatgctcattaaaaaggtatgcgtgtaaagcattattcttgaattggttcctggtatcattaggatctctgtctttcaacatctgtttaagttcatcaagagccacctcctcattttccaaatagtcaaacattttgactgaatgagctactgtgaactctatacacccacacaactaatgtcattaaatatcatgtcaaaaacttgtacaattattaataaaaataatttagtgtttaaattttaccagttccagattttacacctccgttaatacctccattaaccccactggacgatcctcctccccacattccaccgccaccagatgtataagttttagatcctttattactaccatcatgtccatggataaagacactccacatgccgccactaccccctttagaagacatattaataagacttaaggacaagtttaacaataaaattaatcacgagtaccctactaccaacctacactattatatgattatagtttctatttttacagtaccttgactaaagtttctagtcacaagagcaatactaccaacctacactattatatgattatagtttctatttttataggaacgcgtacgagaaaatcaaatgtctaatttctaacggtagtgttgataaacgattatcgtcaatggatacctcctctatcatgtcgtctattttcttactttgttctattaacttattagcattatatattatttgattataaaacttatattgcttattagcccaatctgtaaatatcggattattaacatatcgtttctttgtaggtttatttaacttgtacatcactgtaagcatgtccttaccatttattttaatttgacgcatatccgcaatttctttttcgcagtcggttataaattctatatatgatggatacatgctacatgtgtacttataatcgactaatatgaagtacttgatacatattttcagtaacgatttattattaccacctatgaataagtacctgtgatcgtctaggtaatcaactgttttcttaatacattcgatggttggtaatttactcagaataatttccaatatcttaatatataattctgctatttctgggatatatttatctgccagtataacacaaatagtaatacatgtaaacccatattttgttattatattaatgtctgcgccattatctattaaccattctactaggctgacactatgcgactcaatacaatgataaagtatactacatccatgtttatctattttgtttatatcattaatatacggcttacaaagttttagtatcgataacacatccaactcacgcatagagaaggtagggaataatggcataatatttattaggttatcatcattgtcattatctacaactaagtttccattttttaaaatatactcgacaactttaggatctctattgccaaatttttgaaaatatttatttatatgcttaaatctatataatgtagctccttcatcaatcatacatttaataacattgatgtatactgtatgataagatacatattctaacaatagatcttgtatagaatctgtatatcttttaagaattgtggatattaggatattattacataaactattacacaattctaaaatataaaacgtatcacggtcgaataatagttgatcaactatataattatcgattttgtgatttttcttcctaaactgtttacgtaaatagttagatagaatattcattagttcatgaccactatagttactatcgaataacgcgtcaaatatttcccgtttaatatcgcatttgtcaagataataatagagtgtggtatgttcacgataagtataataacgcatctctttttcgtgtgaaattaaatagtttattacgtccaaagatgtagcataaccatcttgtgacctagtaataatataataatagagaactgttttacccattctatcatcataatcagtggtgtagtcgtaatcgtaatcgtctaattcatcatcccaattataatattcaccagcacgtctaatctgttctattttgatcttgtatccatactgtatgttgctacatgtaggtattcctttatccaataatagtttaaacacatctacattgggatttgatgttgtagcgtatttttctacaatattaataccatttttgatactatttatttctatacctttcgaaattagtaatttcaataagtctatattgatgttatcagaacatagatattcgaatatatcaaaatcattgatatttttatagtcgactgacgacaataacaaaatcacaacatcgtttttgatattattatttttcttggtaacgtatgcctttaatggagtttcaccatcatactcatataatggatttgcaccactttctatcaatgattgtgcactgctggcatcgatgttaaatgttttacaactatcatagagtatcttatcgttaaccatgattggttgttgatgctatcgcattttttggtttctttcatttcagttatgtatggatttagcacgtttgggaagcatgagctcatatgatttcagtactgtagtgtcagtactattagtttcgatcagatcaatgtctagatctatagaatcaaaacacgataggtcagaagataatgaatatctgtacgcttctttttgtactgtaacttctggttttgttagatggttgcatcgtgctttaacgtcaatggtacaaattttatcctcgctttgtgtatcatattcgtccctactataaaattgtatattcagattatcatgcgatgtgtatacgctaacggtatcaataaacggagcacaccatttagtcataaccgtaatccaaaaatttttaaagtatatcttaacgaaagaagttgtgtcattgtctacggtgtatggtactagatcctcataagtgtatatatctagagtaatgtttaatttattaaatggttgataatatggatcctcgtgacaatttccgaagatggaaataagacataaacacgcaataaatctaattgcggacatggttactccttaaaaaaatacgaataatcaccttggctatttagtaagtgtcatttaacactatactcatattaatccatggactcataatctctatacgggattaacggatgttctatatacggggatgagtagttctcttctttaactttatactttttactaatcatatttagactgatgtatgggtaatagtgtttgaagagctcgttctcatcatcagaataaatcaatatctctgtttttttgttatacagatgtattacagcctcatatattacgtaatagaacgtgtcatctaccttattaactttcaccgcatagttgtttgcaaatacggttaatcctttgacctcgtcgatttccgaccaatctgggcgtataatgaatctaaactttaattgcttgtaatcattcgaaataatttttagtttgcatccgtagttatcccctttatgtaactgtaaatttctcaacgcgatatctccattaataatgatgtcgaattcgtgctgtatacccatactgaatggatgaacgaataccgacggcgttaatagtaatttactttttcatctttacatattgggtactagttttactatcataagtttataaattccacaagctactatggaataagccaaccatcttagtataccacacatgtcttaaagtttattaattaattacatgttgttttatatatatcgctacgaatttaaagagaaattagtttaggaagaaaaattatctatctacatcatcacgtctctgtattctacgatagagtgctactttaagatgcgacagatccgtgtcatcaaatatatactccattaaaatgattattccggcagcgaacttgatattggatatatcacaacctttgttaatatctacgacaatagacagcagtcccatggttccataaacagtgagtttatctttctttgaagagatattttgtagagatcttataaaactgtcgaatgacatcgcatttatatctttagctaaatcgtatatgttaccatcgtaatatctaaccgcgtctatcttaaacgtttccatcgctttaaagacgtttccgatagatggtctcatttcatcagtcatactgagccaacaaatataatcgtgtataacatctttgatagaatcagactctaaagaaaacgaatcggctttattatacgcattcatgataaacttaatgaaaaatgtttttcgttgtttaagttggatgaatagtatgtcttaataattgttattatttcattaattaatatttagtaacgagtacactctataaaaacgagaatgacataactaatcataactagttatcaaagtgtctaggacgcgtaattttcatatggtatagatcctgtaagcattgtctgtattctggagctattttctctatcgcattagtgagttcagaatatgttataaatttaaatcgaataacgaacataactttagtaaagtcgtctatattaactcttttattttctagccatcgtaataccatgtttaagatagtatattctctagttactacgatctcatcgttgtctagaatatcacatactgaatctacatccaattttagaaattggtctgtgttacatatctcttctatattattgttgatgtattgtcgtagaaaactattacgtagaccattttctttataaaacgaatatatagtactccaattatctttaccgatatatttgcacacataatccattctctcaatcactacatctttaagattttcgttgttaagatatttggctaaactatataattctattagatcatcaacagaatcagtatatatttttctagatccaaagacgaactctttggcgtcctctataatattcccagaaaagatattttcgtgttttagtttatcgagatctgatctgttcatatacgccatgattgtacggtacgttatgataaccgcataaaataaaaatccattttcatttttaaccaatactattcataattgagattgatgtaatactttgttactttgaacgtaaagacagtacacggatccgtatctccaacaagcacgtagtaatcaaatttggtgttgttaaacttcgcaatattcatcaatttagatagaaacttatactcatcatctgttttaggaatccatgtattattaccactttccaacttatcattatcccaggctatgtttcgtccatcatcgttgcgcagagtgaataattcttttgtattcggtagttcaaatatatgatccatgcatagatcggcaaagctattgtagatgtgatttttcctaaatctaatataaaactcgtttactagcaaacactttcctgatttatcgaccaagacacatatggtttctaaatctatcaagtggtggggatccatagttatgacgcagtaacatatattattacattcttgactgtcgctaatatctaaatatttattgttatcgtattggattctgcatatagatggcttgtatgtcaaagatatagaacacataaccaatttatagtcgcgctttacattctcgaatctaaagttaagagatttagaaaacattatatcctcggatgatgttatcactgtttctggagtaggatatattaaagtctttacagatttcgtccgattcaaataaatcactaaataatatcccacattatcatctgttagagtagtatcattaaatctattatattttatgaaagatatatcactgctcacctctatatttcgtacatttttaaactgtttgtataatatctctctgatacaatcagatatatctattgtgtcggtagacgataccgttacatttgaattaatggtgttccattttacaacttttaacaagttgaccaattcatttctaatagtatcaaactctccatgattaaatattttaatagtatccattttatatcactacggacacaaagtagctgacataaaccattgtataatttttatgttttatgtttattagcgtacacattttggaagttccggcttccatgtatttcctggagagcaagtagatgatgaggaaccagatagtttatatccgtacttgcacttaaagtctacattgtcgttgtatgagtatgatcttttaaacccgctagacaagtatccgtttgatattgtaggatgtggacatttaacaatctgacacgtgggtggatcggaccattctcctcctgaacacaggacactagagttaccaatcaacgaatatccactattgcaactataagttacaacgcttccatcggtataaaaatcctcgtatccgttatgtcttccgttggatatagatggaggggattggcatttaacagattcacaaataggtgcctcgggattccataccatagatccagtaaatcctaattcacaatacgatttagattcaccgatcaactgatatccgctattacaagagtacgttatactagagccaaagtctactccaccaatatcaagttggccattatcgatatctcgaggcgatgggcatctccgtttaatacattgattaaagagtgtccatccagtacctgtacatttagcatatataggtcccattttttgctttctgtatccaggtagacatagatattctatagtgtctcctatgttgtaattagcattagcatcagtctccacactattcttaaatttcatattaatgggtcgtgacggaatagtacagcatgatagaacgcatcctattcccaacaatgtcaggaacgtcacgctctccaccttcatatttatttatccgtaaaaatgttatcctggacatcgtacaaataataaaaagcccatatatgttcgctattgtagaaattgtttttcacagttgctcaaaaacgatggcagtgacttatgagttacgttacactttggagtctcatctttagtaaacatatcataatattcgatattacgagttgacatatcgaacaaattccaagtatttgattttggataatattcgtattttgcatctgctataattaagatataatcaccgcaagaacacacgaacatctttcctacatggttaaagtacatgtacaattctatccatttgtcttccttaactatatatttgtatagataattacgagtctcgtgagtaattccagtaattacatagatgtcgccgtcgtactctacagcataaactatactatgatgtctaggcatgggagacttttttatccaacgatttttagtgaaacattccacatcgtttaatactacatatttctcatacgtggtataaactccacccattacatatatatcatcgtttacgaataccgacgcgcctgaatatctaggagtaattaagtttggaagtcttatccatttcgaagtgccgtgtttcaaatattctgccacacccgttgaaatagaaaattctaatcctcctattacatataactttccatcgttaacacaagtactaacttctgattttaacgacgacatattagtaaccgttttccattttttcgttttaagatctacccgcgatacggaataaacatgtctattgttaatcatgccgccaataatgtatagacaattatgtaaaacatttgcattatagaattgtctatctgtattaccgactatcgtccaatattctgttctaggagagtaatgggttattgtggatatataatcagagtttttaatgactactatattatgttttataccatttcgtgtcactggctttgtagatttggatatagttaatcccaacaatgatatagcattgcgcatagtattagtcataaacttgggatgtaaaatgttgatgatatctacatcgtttggatttttatgtatccactttaataatatcatagctgtaacatcctcatgatttacgttaacgtcttcgtgggataagatagttgtcagttcatcctttgataattttccaaattctggatcggatgtcaccgcagtaatattgttgattatttctgacatcgacgcattatatagttttttaattccatatcttttagaaaagttaaacatccttatacaatttgtgaaattaatattatgaatcatagtttttacacatagatctactacaggcggaacatcaattattatggcagcaactagtatcatttctacattgtttatggtgatgtttatcttcttccagcgcatatagtctaatagcgattcaaacgcgtgatagtttataccattcaatataatcgcttcatcctttagatggtgatcctgaatgcgtttaaaaaaattatacggagacgccgtaataatttccttattcacttgtataatttccccattgatagaaaatattacgctttccattcttaaagtactataagtaattatagtataatgtaaacgtttatatattcaatatttttataaaaatcattttgacattaattcctttttaaatttccgtctatcatctatagaaacatattctatgaatttataaaatgcttttacgtgtcctatcgtaggcgatagaaccgctaaaaagcctatcgaatttctacaaaagaatctgttatatggtatagggagagtataaaacattaaatgtccgtacttattaaagtattcagtagccaatcctaactctttcgaatacttattaatggctcttgttctgtacgaatctatttttttgaacaacggacctagtggtatatcttgttctatgtatctaaaataatgtctgactagatccgttagtttaatatccgcagtcatcttgtctagaatggcaaatctaactgcgggtttaggctttagtttagtttctatatctacatctatgtctttatctaacaccaaaaatataatagctaatattttattacaatcatccggatattcttctacgatctcactaactaatgtttctttggttatactagtatagtcactatcggacaaataaagaaaatcagatgatcgatgaataatacatttaaattcatcatctgtaagatttttgagatgtctcattagaatattattagggttagtactcattatcattcggcagctattacttattttattatttttcaccatatagatcaatcattagatcatcaaaatatgtttcaatcatcctaaagagtatggtaaatgactcttcccatctaatttctgaacgttcaccaatgtctctagccactttggcactaatagcgatcattcgcttagcgtcttctatattattaactggttgattcaatctatctagcaatggaccgtcggacagcgtcattctcatgttcttaatcaatgtacatacatcgccgtcatctaccaattcatccaacaacataagctttttaaaatcatcattataataggtttgatcgttgtcatttctccaaagaatatatctaataagtagagtcctcatgcttagttaacaactattttttatgttaaatcaattagtacaccgctatgtttaatacttattcatattttagtttttaggattgagaatcaatacaaaaattaatgcatcattaattttagaaatacttagtttccacgtagtcaatgaaacatttgaactcatcgtacaggacgttctcgtacaggacgtaactataaaccggtttatatttgttcaagatagatacaaatccgataactttttttacgaattctacgggatccactttaaaagtgtcataccgggttctttttatttttttaaacagatcaatggtgtgatgttgattaggtcttttacgaatttgatatagaatagcgtttacatattctccataatggtcaatcgccatttgttcgtatgtcataaattctttaattatatgacactgtgtattatttagttcatccttgttcattgttaggaatctatccaaaatggcaattatactagaactataggtgcgttgtatacacatattgatgtgtctgtttatacaatccatgatatttggatccatgctactaccttcgggtaaaattgtagcatcatataccatttctagtactttaggttcattattatccattgcagaggacgtcatgatcgaatcataaaaaaatatattatttttatgttattttgttaaaaataatcatcgaatacttcgtaagatactccttcatgaacataatcagttacaaaacgtttatatgaagtaaagtatctacgatttttacaaaagtccggatgcataagtacaaagtacgcgataaacggaataataatagatttatctagtctatctttttctatagctttcatagttagatacatggtctcagaagtaggattatgtaacatcagcttcgataaaatgactgggttatttagtcttacacattcgctcatacatgtatgaccgttaactacagagtctacactaaaatgattgaacaatagatagtctaccattgtttcgtattcagatagtacagcgtagtacatggcatcttcacaaattatatcattgtctaatagatatttgacgcatcttatggatcccacttcaacagccattttaaaatcggtagaatcatattgctttcctttatcattaataatttctagaacatcatctctatcataaaagatacaaatattaactgtttgatccgtaataacattgctagtcgatagcaatttgttaataagatgcgctgggctcaatgtcttaataagaagtgtaagaggactatctccgaatttgttttgtttattaacatccgttgatggaagtaaaagatctataatgtctacattcttgactgttttagagcatacaatatggagaggtgtatttccatcatgatctggttttgagggactaattcctagtttcatcatccatgagattgtagaagcttttggattgtctgacataagatgtctatgaatatgatttttgccaaatttatccactatcctggcttcgaatccgatggacattatttttttaaacactctttctgaaggatctgtacacgccaacaacggaccacatccttcttcatcaaccgagttgttaatcttggctccatactgtaccaataaatttattctctctatgacttcatcatctgttcccgagagataatatagaggcgttttatgctgtttatcacacgcgtttggatctgcgccgtgcgtcagcagcatcgcgactattctattattattaattttagaagctatatgcaatggataatttccatcatcatccgtctcatttggagagtatcctctatgaagaagttcttcgacaaatcgttcatctagtcctttaattccacaatacgcatgtagaatgtgataattatttccagaaggttcgatagcttgtagcatattcctaaatacatctaaatttttactattatatttggcataaagagatagataatactcggccaacataatgttgtccattgtagtataaaaattaatatttctatttctatttctgtatatttgcaacaatttactctctataacaaatatcataacttagttcttttatgtcaagaaggcactggtttagttcatctataaatgtcacgccataactactacgcatgccatactcagaattatgataaagatatttatccttggggtgtaggtaatggggattaatctttgttggatcagtctctaagttaacacatgtcacacatgatccatttatagttatatcacacgatgatgatttatgaattgattccggaagatcgctatcgtattttgtggttccacaattcatttccatacatgttattgtcacactaatattatgatgaactttatctagccgctgagtggtaaacaacagaacagatagtttattatctttaccaacaccctcagccgctgccacaaatctctgatccgtatccatgatggtcatgtttatttctagtccgtatccagtcaacactatgttagcatttctgtcgatatagctttcactcatatgacactcaccaataatagtagaattaatgtcgtaatttacaccaatagtgagttcggcggcaaagtaccaataccggtaatcttgtcgaggaggacatatagtattcttgtattctaccgaatacccgagagatgcgatacaaaagagtaagactaatttgtaaaccatcttactcaaaatatgtaacaatagtacgatgcaatgagtaagacaataggaaatctatcttatatacacataattattctatcaattttaccaattagttagtgtaatgttaacaaaaatgtgggagaatctaattagtttttctttacacaattgacgtacatgagtctgagttccttgtttttgctaattatttcatccaatttattattcttgacgatatcgagatcttttgtataggagtcagacttgtattcaacatgcttttctataatcattttagctatttcggcatcatccaatagtacattttccagattagcagaatagatattaatgtcgtatttgaacagagcctgtaacatctcaatgtctttattatctatagccaatttaatgtccggaatgaagagaagggaattattggtgtttgtcgacgtcatatagtcgagcaagagaatcatcatatccacgtgtccattttttatagtgatgtgaatacaactaaggagaatagccagatcaaaagtagatggtatctctgaaagaaagtaggaaacaatacttacatcattaagcatgacggcatgataaaatgaagttttccatccagttttcccatagaacatcagtctccaatttttcttaacaaacagttttaccgtttgcatgttaccactatcaaccgcataatacaatgcagtgtttcccttgtcatcaaattgtgaatcatccagtccactgaatagcaaaatctttactattttggtatcttccaatgtggctgcctgatgtaatggaaattcattctctagaagatttttcaatgctccagcgttcaacaacgtacatactagacgcacgttattatcagctattgcataatacaaggcactatgtccatggacatccgccttaaatgtatctttactagagagaaagcttttcagctgcttagacttccaagtattaattcgtgacagatccatgtctgaaacgagacgctaattagtgtatattttttcattttttatcatattgcaccagaattaataatatctctaatagatctgattagtagatacatggctatcgcaaaacaacatatacacatttaataaaaataatatttattaagaaaattcagatttcacgtacccatcaatataaataaaataatgattccttacaccgtacccatattaaggagattccaccttacccataaacaatataaatccagtaatatcatgtctgatgatgaacacaaatggtgtattaaattccagtttttcaggagatgatctcgccgtagctaccataatagtagatgcctctgctacagttccttgttcgtcgacatctatctttgcattctgaaacattttataaatatataatgggtccctagtcatatgtttaaacgacgcattatctggattaaacatactaggagccatcatttcggctatcgacttaatatccctcttattttcgatagaaaatttagggagtttaagattgtacactttattccctaattgagacgaccaatagtctaattttgcagccgtgatagaatctgtgaaatgggtcatattatcacctattgccaggtacatactaatattagcatccttatacggaaggcgtaccatgtcatattctttgtcatcgattgtgattgtatttccttgcaatttagtaactacgttcatcatgggaaccgttttcgtaccgtacttattagtaaaactagcattgcgtgttttagtgatatcaaacggatattgccatatacctttaaaatatatagtattaatgattgcccatagagtattattgtcgagcatattagaatctactacattagacataccggatctacgttctactatagaattaattttattaaccgcatctcgtctaaagtttaatctatataggccgaatctatgatattgttgataatacgacggtttaatgcacacagtattatctacgaaactttgataagttagatcagtgtacgtatatttagatgttttcagcttagctaatcctgatattaattctgtaaatgctggacccagatctctttttctcaaatccatagtcttcaataattctattctagtattacctgatgcaggcaatagcgacataaacatagaaaacgaataaccaaacggtgagaagacaatattatcatcttgaatatttttatacgctactataccggcattggtaaatccttgtagacgataggcggacgctgaacacgctaacgatagtatcaataacgcaatcatgattttatggtattaataattaaccttatttttatgttcggtataaaaaaattattgatgtctacacatccttttgtaattgacatctatatatccttttgtataatcaactctaatcactttaacttttacagttttccctaccagtttatccctatattcaacatatctatccatatgcatcttaacactctctgccaagatagcttcagagtgaggatagtcaaaaagataaatatatagagcataatcattctcgtatactctgccctttattacatcacccgcattgggcaacgaataacaaaatgcaagcatcttgttaacgggctcgtaaattgggataaaaattatgtttttattgtcttatatctattttattcaagagaatattcaggaatttctttttccggttgtatctcgtcgcagtatatatcatttgtacattgtttcatattttttaatagtttacaccttttagtaggactagtatcgtacaattcatagctgtattttgaattccaatcacgcataaaaatatcttccaattgttgacgaagacctaatccatcatccggtgtaatattaatagatgctccacatgtatccgtaaagtaatttcctgtccaatttgaggtacctatataggccgttttatcggttaccatatatttggcatggtttaccctagaatacggaatgggaggatcagcatctggtacaataaatagctttacttctatatttatgtttttagattttagcatagcgatagatcttaaaaagtttctcatgataaacgaagatcgttgccagcaactaatcaatagcttaacggatacttgtctgtctatagcggatcttcttaattcatcttctatataaggccaaaacaaaattttacccgccttcgaataaataatagggataaagttcataacagatacataaacgaatttactcgcatttctaatacatgacaataaagcggttaaatcattggttctttccatagtacatagttgttgcggtgcagaagcaataaatacagagtgtggaacgccgcttacgttaatactaagaggatgatctgtattataatacgacggataaaagtttttccaattatatggtagattgttaactccaagataccagtatacctcaaaaatttgagtgagatccgctgccaagttcctattattgaagatcgcaatacccaattccttgacctgagttagtgatctccaatccatgttagcgcttcctaaataaatatgtgtattatcagatatccaaaattttgtatgaagaactcctcctaggatatttgtaatatctatgtatcgtacttcaactccggccatttgtagtctttcaacatcctttaatggtttgttagatttattaacggctactctaactcgtactcctcttttgggtaattgtacaatctcgtttaatattatcgtgccgaaattcgtacccacttcatccgataaactccaataaaaagatgatatatctagtgtttttgtggtattggatagaatttccctccacatgttaaatgtagacaaatatactttatcaaattgcatacctataggaatagtttctgtaatcactgcgattgtattatccggattcattttatttgttaaaagaataatcctatatcacttcactctattaaaaatccaagtttctatttctttcatgactgattttttaacttcatccgtttccttatgaagatgatgtttggcaccttcataaatttttatttctctattacaatttgcatgttgcatgaaataatatgcacctaaaacatcgctaatcttattgtttgttccctggagtatgagagtcgggggggtgttaatcttggaaattatttttctaaccttgttggtagccttcaagacctgactagcaaatccagccttaattttttcatgattgactaatgggtcgtattggtatttataaactttatccatatctctagatactgattctggacatagctttccgactggcgcatttggtgtgatggttcccataagtttggcagctagcagattcagtcttgaaacagcatctgcattaactagaggagacattagaatcattgctgtaaacaagtttggattatcgtaagaggctagctcccatggaatgacccaataagtagatttaatagttaccacgtgctgtaccaaagtcatcaatcatcattttttcaccattacttcttccatgtccaatatgatcatgtgagaatactaaaattcctaacgatgatatgttttcagctagttcgtcataacgtccagaatgtttaccagctccatgacttatgaatactaatgccttaggatatgtaataggtttccaatatttacaatatatgtaatcattgtccagattgaacatacagtttgcactcatgattcacgttatataactatcaatattaacagttcgtttgatgatcatattatttttatgttttattgataattgtaaaaacatacaattaaatcaatatagaggaaggagacggctactgtcttttgtaagatagtcatggcgactaaattagattatgaggatgctgttttttactttgtggatgatgataaaatatgtagtcgcgactccatcatcgatctaatagatgaatatattacgtggagaaatcatgttatagtgtttaacaaagatattaccagttgtggaagactgtacaaggaattgatgaagttcgatgatgtcgctatacggtactatggtattgataaaattaatgagattgtcgaagctatgagcgaaggagaccactacatcaattttacaaaagtccatgatcaggaaagtttattcgctaccataggaatatgtgctaaaatcactgaacattggggatacaaaaagatttcagaatctagattccaatcattgggaaacattacagatttgatgaccgacgataatataaacatcttgatactttttctagaaaaaaaattgaattgatgatataggggtcttcataacgcataattattacgttagcattctatatccgtgttaaaaaaaattatcctatcatgtatttgagagttttatatgtagcaaacatgatagctgtgatgccaataagctttagatattcacgcgtgctagtgttagggatggtattatctggtggtgaaatgtccgttatataatctacaaaacaatcatcgcatatagtatgcgatagtagagtaaacatttttatagtttttactggattcatacatcgtctacccaattcggttataaatgaaattgtcgccaatcttacacccaaccccttgttatccattagcatagtattaacttcgttatttatgtcataaactgtaaatgattttgtagatgccatatcatacatgatattcatgtccctattataatcattactaactttatcacaatatatgttgataatatctatatatgatctagtctttgtgggcaactgtctatacaagtcgtctaaacgttgtttactcatatagtatcgaacagccatcattacatggtcccgttccgttgatagataatcgagtatgttagtggacttgtcaaatctatataccatattttctggaagtggatatacatagtcgtgatcaacattattgctagcctcatcttctatatcctgtactataccattatctatatcatctacataatctatgatattattacacataaacatcgacaacatactattgtttattatctaagtcctgttgatccaaacccttgatctcctctatttgtactatctagagattgtacttcttccagttctggataatatatacgttgatagattagctgagctattctatctccagtatttacattaaacgtacattttccattattaataagaatgactcctatgtttcccctataatcttcgtctattacaccacctcctatatcaatgccttttagtgacagaccagacctaggagctattctaccatagcagaacttaggcatggacatactaatatctgtcttaattaactgtctttctcctggagggatagtataatcgtaagcgctatacaaatcatatccggcagcacccggcgattgcctagtaggagatttagctctgttagtttccttaacaaatctaactggtgagttaatattcatgttgaacataaaactaatattttatttcaaaattatttaccatcccatatattccatgaataagtgtgatgattgtacacttctatagtatctatatacgatccacgataaaatcctcctatcaatagcagtttattatccactatgatcaattctggattatccctcggataaataggatcatctatcagagtccatgtattgctggattcacaataaaattccgcatttctaccaaccaagaataaccttctaccgaacactaacgcgcatgatttataatgaggataataagtggatggtccaaactgccactgatcatgattgggtagcaaatattctgtagttgtatcagtttcagaatgtcctcccattacgtatataacattgtttatggatgccactgctggattacatctaggtttcagaagactcggcatattaacccaagcagcatccccgtggaaccaacgctcaacagatgtgggatttggtagacctcctactacgtataatttattgttagcgggtatcccgctagcatacagtctggggctattcatcggaggaattggaatccaattgtttgatatataatttaccgctatagcattgttatgtatttcattgttcatccatccaccgatgagatatactacttctccaacatgagtacttgtacacatatggaatatatctataatttgatccatgttcataggatactctatgaatggatacttgtatgatttgcgtggttgtttatcacaatgaaatattttggtacagtctagtatccattttacattatttatacctctgggagaaagataatttgacctgattacatttttgataaggagtagcagatttcctaatttatttcttcgctttatataccacttaatgacaaaatcaactacataatcctcatctggaacatttagttcatcgctttctagaataagtttcatagatagataatcaaaattgtctatgatgtcatcttccagttccaaaaagtgtttggcaataaagtttttagtatgacataagagattggatagtccgtattctatacccatcatgtaacactcgacacaatattcctttctaaaatctcgtaagataaagtttatacaagtgtagatgataaattctacagaggttaatatagaagcacgtaataaattgacgacgttatgactatctatatatacctttccagtatacgagtaaataactatagaagttaaactgtgaatgtcaaggtctagacaaaccctcgtaactggatctttatttttcgtgtatttttgacgtaaatgtgtgcgaaagtaaggagataactttttcaatatcgtagaattgactattatattgcctcctatggcatcaataattgttttgaatttcttagtcatagacaatgctaatatattcttacagtacacagtattgacaaatatcggcatttatgtttctttaaaagtcaacatctagagaaaaatgattatctttttgagacataactcccattttttggtattcacccacacgtttttcgaaaaaattagtttttccttccaatgatatattttccatgaaatcaaacggattggtaacattataaatttttttaaatcccaattcagaaatcaatctatccgcgacgaattctatatatgttttcatcatttcacaattcattcctataagtttaactggaagagccgcagtaagaaattcttgttcaatggatactgcatctgttataatagatctaacggtttcttcactcggtggatgcaataaatgtttaaacatcaaacatgcgaaatcgcagtgcagaccctcgtctctactaattagttcgttggaaaacgtgagtccgggcattaggccacgctttttaagccaaaatatggaagcgaatgatccggaaaagaagattccttctactgcagcaaaggcaataagtctctctccataaccggcgctgtcatgtatccacttttgagcccaatcggccttcttttttacacaaggcatcgtttctatggcattaaagagatagtttttttcattactatctttaacataagtatcgatcaaaagactatacatttccgaatgaatgttttcaatggccatctgaaatccgtagaaacatctagcctcggtaatctgtacttctgtacaaaatcgttccgccaaattttcattcactattccgtcactggctgcaaaaaacgccaatacatgttttataaaatatttttcgtctggtgttagtttattccaatcattgatatctttagatatatctacttcttccactgtccaaaatgatgcttctgcctttttatacatgttccagatgtcatgatattggattgggaaaataacaaatctatttggatttggtgcaaggatgggttccataactaaattaacaataacaataaattttttttcagttatctatatgcctgtacttggatcttttgtacatcgatatcgccgcaatcactacaataattacaagtattattgatagcattgttattagtactatcataattaaattatctacattcatgggtgctgaataatcgttattatcatcattatcattttgtaattgtgacatcatactagataaatcgtttgcgagattgttgtgggaagcgggcatggaggatgcattatcattattatttaacgccttccattcggattcacaaatgttacgcacattcaacattttatggaaactataattttgtgaaaacaaataacaagaaaactcgtcatcgttcaaatttttaacgatagtaaaccgattaaacgtcgagctaatttctaacgctagcgactctgttggatatgggtttccagatatatatcttttcagttcccctacgtatctataatcatctgtaggaaatggaagatatttccatttatctactgttcctaatatcatatgtggtggtgtagtagaaccattaagcgcgaaagatgttatttcgcatcgtattttaacttcgcaataatttctggttagataacgcactctaccagtcaagtcaatgatattagcctttacagatatattcatagtagtcgtaacgatgactccatcttttagatgcgatactcctttgtatgtaccagaatcttcgtacctcaaactcgatatatttaaacaagttaatgagatattaacgcgttttatgaatgatgatatataaccagaagttttatcctcggtggctagcgctataaccttatcattataataccaactagtgtgattaatatgtgacacgtcagtgtgggtacaaatatgtacattatcgtctacgtcgtattcgatacatccgcatacagccaacaaatataaaatgacaaatactctaacgccgttcgtacccatcttgatgcggtttaataaatgttttgatttcaatttattgtaaaaaaagattcggttttatactgttcgatattctcattgcttatattttcatctatcatctccacacagtcaaatccgtggttagcatgcacctcatcaaccggtaaaagactatcggactcttctatcattataactctagaatatttaatttggtcattattaatcaagtcaattatcttatttttaacaaacgtgagtattttactcattttttataaaaacttttagaaatatacagactctatcgtgtgtctatatcttctttttatatccaatgtatttatgtctgatttttcttcatttatcatatataatggtccaaattctacacgtgcttcggattcatccagatcattaaggttcttataattgtaacatccttctcttccctcttctacatcttccttcttattcttattcttagcgtcacagaatctaccacagcaggatcccatgacgagcgtcatattaaactaatccattttcaattataatatatgattagtaatgaccattaaaataaaaaatattcttcataaccggcaagaaagtgaaaagttcacattgaaactatgtcagtagtatacatcatgaaatgatgatatatatatatactctattttggtggaggattatatgatataattcgtggataatcattcttaagacacatttcttcattcgtaaatcttttcacgttaaatgagtgtccatattttgcaatttcttcatatgatggcggtgtacgtggacgaggctgctcctgttcttgttgtagtcgccgactgtcgtgtctgcgtttagatccctccattatcgcgattgcgtagatggagtactattttataccttgtaattaaatttttttattaattaaacgtataaaaacgttccgtatctgtatttaagagccagatttcgtctaatagaacaaatagctacagtaaaaataactagaataattgctacacccactagaaaccacggatcgtaatacggcaatcggttttcgataataggtggaacgtatattttatttaaggacttaacaattgtctgtaaaccacaatttgcttccgcggatcctgtattaactatctgtaaaagcatatgttgaccgggcggagccgaacattctccgatatctaatttctgtatatctataatattattaacctccgcatacgcattacagttcttttctagcttggataccgcactaggtacatcgtctagatctattcctatttcctcagcgatagctcttctatccttttccggaagcaatgaaatcacttcaataaatgattcaaccatgagtgtgaaactaagtcgagaattactcatgcatttgttagttattcggagcgcgcaatttttaaactgtcctataacctctcctatatgaatagcacaagtgacattagtagggatagaatgttgagctaatttttgtaaataactatctataaaaagattatacaaagttttaaactctttagtttccgccatttatccagtctgagaaaatgtctctcataataaatttttccaagaaactaattgggtgaagaatggaaacctttaatctatatttatcacagtctgttttggtacacatgatgaattcttccaatgccgtactaaattcgatatctttttcgatttctggatatgtttttaataaagtatgaacaaagaaatggaaatcgtaataccagttatgtttaactttgaaattgttttttattttcttgttaatgattccagccacttgggaaaagtcaaagtcgtttaatgccgatttaatacgttcattaaaaacaaactttttatcctttagatgaattattattggttcattggaatcaaaaagtaagatattatcgggtttaagatctgcgtgtaaaaagttgtcgcaacagggtagttcgtagattttaatgtataacagagccatctgtaaaaagataaactttatgtattgtaccaaagatttaaatcctaatttgatagctaactcggtatctactttatctgccgaatacagtgctaggggaaaaattataatgtttcctctttcgtattcgtagttagttctcttttcatgttcgaaaaagtgaaacatgcggttaaaatagtttataacattaatattactgttaataactgccggataaaagtgggatagtaatttcacgaatttgatactgtcctttctctcgttaaacgcctttaaaaaaactttagaagaatatctcaatgagagttcctgaccatccatagtttgtatcaataatagcaacatatgaagaacccgtttatacagagtatgtaaaaatgttaatttatagtttaatcccatggcccacgcacacacgattaattttttttcatctccctttagattgttgtatagaaatttgggtactgtgaactccgccgtagtttccatgggactatataattttgtggcctcgaatacaaattttactacatagttatctatcttaaagactataccatatcctcctgtagatatgtgataaaaatcgtcgtttataggataaaatcgtttatccttttgttggaaaaaggatgaattaatgtaatcattctcttctatctttagtagtgtttccttattaaaattcttaaaataatttaacaatctaactgacggagcccaattttggtgtaaatctaattgggacattatattgttaaaatacaaacagtctcctaatataacagtatctgataatctatggggagacatccattgatattcaggggatgaatcattggcaacacccatttattgtacaaaaagccccaatttacaaacgaaagtccaggtttgatagagacaaactattaactattttgtctctgtttttaacacctccacagtttttaatttctttagtaatgaaattattcacaatatcagtatcttctttatctaccagagattttactaacttgataaccttggctgtctcattcaatagggtagtaatatttgtatgtgtgatattgatatctttttgaattgtttcttttagaagtgattctttgatggtgccagcatacgaattacaataatgcagaaactcggttaacatgcaggaattatagtaagccaattccaattgttgcctgtgttgtattagagtgtcaatatgagcaatggtgtccttgcgtttctctgatagaatgcgagcagcgattttggcgttatcatttgacgatatttctggaatgacgaatcctgtttctactaactttttggtaggacaaagtgaaacaatcaagaagatagcttctcctcctatttgtggaagaaattgaactcctctagatgatctactgacgatagtatctccttgacagatattggaccgaattacagaagtacctggaatgtaaagccctgaaaccccctcattttttaagcagattgttgccgtaaatcctgcactatgcccaagatagagagctcctttggtgaatccatctctatgtttcagtttaaccaagaaacagtcagctggtctaaaatttccatctctatctaatacagcatctaacttgatgtcaggaactatgaccggtttaatgttatatgtaacattgagtaaatccttaagttcataatcatcactgtcatcagttatgtacgatccaaacaatgtttctaccggcatagtggatacgaagatgctatccatcagaatgtttccctgattagtattttctatatagctattcttctttaaacgattttccaaatcagtaactatgttcatttttttaggagtaggacgcctagccagtatggaagaggattttctagatcctctcttcaacatctttgatctcgatggaatgcaaaaccccatagtgaaacaaccaacgataaaaataatattgtttttcactttttataattttaccatctgactcatggattcattaatatctttataagagctactaacgtataattctttataactgaactgagatatatacaccggatctatggtttccataattgagtaaatgaatgctcggcaataactaatggcaaatgtatagaacaacgaaattatactagagttgttaaagttaatattttctatgagctgttccaataaattatttgttgtgactgcgttcaagtcataaatcatcttgatactatccagtaaaccgtttttaagttctggaatattattatcccattgtaaagcccctaattcgactatcgaatatcctgctctgatagcagtttcaatatcgacggacgtcaatactgtaataaaggtggtagtattgtcatcatcgtgataaactactggaatatggtcgttagtaggtacggtaactttacacaacgcgatatataactttccttttgtaccatttttaacgtagttgggacgtcctgcagggtattgttttgaagaaatgatatcgagaacagatttgatacgatatttgttggattcctgattattcactataatataatctagacagatagatgattcgataaatagagaaggtatatcgttggtaggataatacatccccattccagtattctcggatactctattgatgacactagttaagaacatgtcttctattctagaaaacgaaaacatcctacatggactcattaaaacttctaacgctcctgattgtgtctcgaatgcctcgtacaaggatttcaaggatgccatagattctttgaccaacgatttagaattgcgtttagcatctgatttttttattaaatcgaatggtcggctctctggtttgctaccccaatgataacaatagtcttgtaaagataaaccgcaagaaaatttatacgcatccatccaaataaccctagcaccatcggatgatattaatgtattattatagattttccatccacaattattgggccagtatactgttagcaacggtatatcgaatagattactcatgtaacctactagaatgatagttcgtgtactagtcataatatctttaatccaatctaaaaaatttaaaattagattttttacactgttaaagttaacaaaagtattacccgggtacgtggatatcatatatggcattggtccattatcagtaatagctccataaactgatacggcgatggtttttatatgtgtttgatctaacgaggaagaaattcgcgcccacaattcatctctagatatgtatttaatatcaaacggtaacacatcaatttcgggacgcgtatatgtttctaaatttttaatccaaatataatgatgacctatatgccctattatcatactgtcaactatagtacacctagggaacttacgatacatctgtttcctataatcgttaaattttacaaatctataacatgctaaaccttttgacgacagccattcattaatttctgatatggaatctgtattctcgataccgtatcgttctaaagccagtgctatatctccctgttcgtgggaacgctttcgtataatatcgatcaacggataatctgaagtttttggagaataatatgactcatgatctatttcgtccataaacaatctagacataggaattggaggcgatgatcttaattttgtgcaatgagtcgtcaatcctataacttctaatcttgtaatattcatcatcgacataatactatctatgttatcatcgtatattagtataccatgaccttcttcatttcgtgccaaaatgatatacagtcttaaatagttacgcaatatctcaatagtttcataattgttagctgttttcatcaaggtttgtatcctgtttaacatgatggcgttctataacgtctctattttctatttttaattttttaaatttttaacgatttactgtggctagatacccaatctctctcaaatatttttttagcctcgcttacaagctgtttatctatactattaaaactgacgaatccgtgattttggtaatgggttccgtcgaaatttgccgaagtgatatgaacatattcgtcgtcgactatcaacaattttgtattattctgaatagtgaaaaccttcacagatagatcattttgaacacacaacgcatctagacttttggcggttgccatagaatatacgtcgttcttatcccaattaccaactagaagtctgatcttaactcctctattaatggctgcttctataatggagttgtaaatgtcgggccaatagtagctattaccgtcgacacgtgtagtgggaactatggccaaatgttcaatatctatactagtcttagctgacctgagtttatcaataactacatcggtatctagatctctagaatatcccaataggtgttccggagaatcagtaaagaacactccacctataggattcttaatatgatacgcagtgctaactggcaaacaacaagccgcagagcataaattcaaccatgaattttttgcgctattaaaggctttaaaagtatcaaatcttctacgaagatctgtggccagcgggggataatcagaatatacacctaacgttttaatcgtatgtatagatcctccagtaaatgacgcgtttcctacataacatctttcatcatctgacacccaaaaacaaccgagtagtagtcccacattattttttttatctatattaacggttataaaatttatatccgggcagtgactttgtagctctcccagatttcttttccctcgttcatctagcaaaactattattttaatccctttttcagatgcctcttttagtttatcaaaaataagcgctcccctagtcgtactcagaggattacaacaaaaagatgctatgtatatatatttcttagctagagtgataatttcgttaaaacattcaaatgttgttaaatgatcggatctaaaatccatattttctggtagtgtttctaccagcctacattttgctcccgcaggtaccgatgcaaatggccacatttagttaacataaaaacttatacatcctgttctatcaacgattctagaatatcatcggctatatcgctaaaattttcatcaaagtcgacatcacaacctaactcagtcaatatattaagaagttccatgatgtcatcttcgtctatttctatatccgtatccattgtagattgttgaccgattatcgagtttaaatcattactaatactcaatccttcagaatacaatctgtgtttcattgtaaatttataggcggtgtatttaagttggtagattttcaattatgtattaatatagcaacagtagttcttgctcctccttgattctagcatcctcttcattattttcttctacgtacataaacatgtccaatacgttagacaacacaccgacgatggcggccgctacagacacgaatatgactaaaccgatgaccatttaaaaacccctctctagctttcacttaaactgtatcgatcattcttttagcacatgtataatataaaaacattattctatttcgaatttaggcttccaaaaatttttcatccgtaaaccgataataatatatatagacttgttaatagtcggaataaatagattaatgcttaaactatcatcatctccacgattagagatacaatatttacattctttttgctgtttcgaaactttatcaatacacgttaatacaaacccaggaaggagatattgaaactgaggctgttgaaaatgaaacggtgaatacaataattcagataatgtaaaatcatgattccgtattctgatgatattagaactgctaatggatgtcgatggtatgtatctaggagtatctattttaacaaagcatcgatttgctaatatacaattatccttttgattaattgttattttattcatattcttaaaaggtttcatatttatcaattcttctacattaaaaatttccatttttaatttatgtagccccgcaatactcctcattacgtttcattttttgtctataatatccattttgttcatctcggtacatagattatccaattgagaagcgcatttagtagttttgtacattttaagtttattgacgaatcgtcgaaaactagttatagttaacattttattatttgataccctgatattaatacccctgccgttactattatttataactgatgtaatccacgtaacattggaattaactatcgatagtaatgcatcgacgcttccaaaattgtctattataaactcaccgataatttttttattgcatgttttcatattcattaggattatcaaatctttaatcttattacgattgtatgcgttgatattacaagacgtcattctaaaagacggaggatctccatcaaatgccagacaatcacgtacaaagtacatggaaataggttttgttctattgcgcatcatagatttatatagaacacccgtagaaatactaatttgttttactctataaaatactaatgcatctatttcatcgttttgtataacgtctttccaagtgtcaaattccaaatttttttcattgatagtaccaaattcttctatctctttaactacttgcatagataggtaattacagtgatgcctacatgccgttttttgaaactgaatagatgcgtctagaagcgatgctacgctagtcacaatcaccactttcatatttagaatatatatatgtaaaaatatagtagaatttcattttgtttttttctatgctataaatgaattctcattttgcatctgctcatactccgttttatattaataccaaagaaggaagatatctggttctaaaagccgttaaagtatgcgatgttagaactgtagaatgcgaaggaagtaaagcttcctgcgtactcaaagtagataaaccctcatcgcccgcgtgtgagagaagaccttcgtccccgtccagatgcgagagaatgaataaccctggaaaacaagttccgtttatgaggacggacatgctacaaaatatgttcgcggctaatcgcgataatgtagcttctagacttttgtcctaaaatactattatatccttttcgatattaataaatccgtgtcgtccaggttttttatctctttcagtatgtgaatagataggtattttatctctattcatcatcgaatttaagagatccgataaacattgtttgtattctccagatgtcagcatctgatacaacaatatatgtgcacataaacctctggcacttatttcatgtaccttccccttatcactaaggagaatagtatttgagaaatatgtatacatgatattatcatgaattagatatacagaatttgtaacactctcgaaatcacacgatgtgtcggcgttaagatctaatatatcactcgataacacattttcatctagatacactagacattttttaaagctaaaatagtctttagtagtaacagtaactatgcgattattttcatcgatgatacatttcatcggcatattattacgcttaccatcaaagactataccatgtgtatatctaacgtattctagcatagttgccatacgcgcattaaacttttcaggatctttggatagatcttccaatctatctatttgagaaaacatttttatcatgttcaatagttgaaacgtcggatccactatatagatattatctataaagattttaggaactacgttcatggtatcctggcgaatattaaaactatcaatgatatgattatcgttttcatcttttatcaccatatagtttctaagatatgggattttacttaatataatattatttcccgtgataaattttattagaaaggccaaatctataagaaaagtcctagaattagtctgaagaatatctatatcgccgtatagtatatttggattaattagatatagagaatatgatccgtaacatatacaacttttattatggcgtctaagatattcttccatcaacttattaacatttttgactagggaagatacattatgacgtcccattacttttgccttgtctattactgcgacgttcatagaatttagcatatctcttgccaattcttccattgatgttacattataagaaattttagatgaaattacatttggagctttaatagtaagaactcctaatatgtccgtgtatgtggtcactaatacagattgtagttctataatcgtaaataatttacctatattatatgtttgagtctgtttagaaaagtagctaagtatacgatcttttatttctgatgcagatgtatcaacatcggaaaaaaatctttttttattcttttttactaaagatacaaatatgtctttgttaaaaacagttattttctgaatatttctagcttgtaattttaacatatgatattcgttcacactaggtactctgcctaaataggtttctataatctttaatgtaatattaggaaaagtattctgatcaggattcctattcattttgaggatttaaaactctgattattgtctaatatggtctctacgcaaactttttcacagagcgatagagtttttgataactcgtttttcttaagaaatataaaactactgtctccagagctcgctctatcttttattttatctaattcgatacaaactcctgatactggttcagaaagtaattcattaattttcagtcctttatagaagatatttaatatagataatacaaaatcttcagtttttgatatcgatctgattgatcctagaactagatatattaataacgtgctcattaggcagtttatggcagcttgataattagatatagtatattccagttcatatttattagataccgcattgcccagattttgatattctatgaattcctctgaaaataaatccaaaataactagacattctattttttgtggattagtgtactctcttccctctatcatgttcactactggtgtccacgatgataaatatctagagggaatataatatagtccataggatgccaatctagcaatgtcgaataactgtaattttattcttcgctcttcattatgaattgattcttgaggtataaacctaacacaaattatattattagacttttcgtatgtaatgtctttcatgttataagtttttaatcctggaatagaatctattttaatgaggcttttaaacgcagagttctccaacgagtcaaagcataatactctgttgtttttcttatatacgatgttacgattttcttctttgaatggaataggtttttgaattagtttataattacaacataatagataaggaagtgtgcaaatagtacgcggaaaaaacataatagctcccctgttttcatccatggttttaagtaaatgatcactggcttctttagtcaatggatattcgaacattaaccgtttcatcatcattggacagaatccatatttcttaatgtaaagagtgatcaaatcattgtgtttattgtaccatcttgttgtaaatgtgtattcggttatcggatctgctcctttttctattaaagtatcgatgtcaatctcgtctaagaattcaactatatcgacatatttcatttgtatacacataaccattactaacgtagaatgtataggaagagatgtaacgggaacagggtttgttgattcgcaaactattctaatacataattcttctgttaatacgtcttgcacgtaatctattatagatgccaagatatctatataattattttgtaagatgatgttaactatgtgatctatataagtagtgtaataattcatgtattttgatatatgttccaactctgtctttgtgatgtctagtttcgtaatatctatagcatcctcaaaaaatatattcgcatatattcccaagtcttcagttctatcttctaaaaaatcttcaacgtatggaatataataatctattttacctcttctgatatcattaatgatatagtttttgacactatcttctgtcaattgattcttattcactatatctaagaaacggatagcgtccctaggacgaactactgccattaatatctctattatagcttctggacataattcatctattataccagaattaatgggaactattccgtatctatctaacatagttttaagaaagtcagaatctaagacctgatgttcatatattggttcatacatgaaatgatctctattgatgatagtgactatttcattctctgaaaattggtaactcattctatatatgctttccttgttgatgaaggatagaatatactcaatagaatttgtaccaacaaactgttctcttatgaatcgtatatcatcatctgaaataatcatgtaaggcatacatttaacaattagagacttgtctcctgttatcaatatactattcttgtgataatttatgtgtgaggcaaatttgtccacgttctttaattttgttatagtagatatcaaatccaatggagctacagttcttggcttaaacagatatagtttttctggaacaaattctacaacattattataaaggactttgggtagataagtgggatgaaatcctattttaattaatgcgatagccttgtcctcgtgcagatatccaaacgcttttgtgatagtatggcattcattgtctagaaacgctctacgaatatctgtgacagatatcatctttagagaatatactagtcgcgttaatagtactacaatttgtattttttaatctatctcaataaaaaaattaatatgtatgattcaatgtataactaaactactaactgttattgataactagaatcagaatctaatgatgacgtacccaagaagtttatctactgccaatttagctgcattatttttagcatctcgtttagattttccatctgccttatcgaatactcttccgtcgatatctacacaggcataaaatgtaggagagttactaggcccaactgattcaatacgaaaagaccaatctctcttagttatttggcagtactcattaataacggtgacagggttagcatctttccaatcaataatttttttagccggaataacatcatcaaaagacttatgatcctctctcattgatttttcgcgggatacatcatctattatgacgtcagccataacatcagcatccggcttatccgcctccgttgtcataaaccaacgaggaggaatatcgtcggagctgtacaccatagcactacgttgaagatcgtacagagctttattaacttctcgcttctccatattaagttgtctagttagttgtgcagcagtagctccttcgattccaatggttttaatagcctcacacacaatctctgcgttagaacgttcgtcgatatagattttagacatttttagagagaactaacacaaccagcaataaaactgaacctactttatcatttttttattcatcatcctctggtggttcgtcgttcctatcaaatgtagctctgattaacccgtcatctataggtgatgctggttctggagattctggaggagatggattattatctggaagaatctctgttatttccttgttttcatgtatcgattgcgttgtaacattaagattgcgaaatgctctaaatttgggaggcttaaagtgttgtttgcaatctctacacgcgtgtctaactagtggaggttcgtcagctgctctagtttgaatcatcatcggcgtagtattcctacttttacagttaggacacggtgtattgtatttctcgtcgagaacgttaaaataatcgttgtaactcacatcctttattttatctatattgtattctactcctttcttaatgcattttataccgaataagagatagcgaaggaattctttttcggtgccgctagtacccttaatcatatcacatagtgttttatattccaaatttgtggcaatagacggtttatttctatacgatagtttgtttctggaatcctttgagtattctataccaatattattctttgattcgaatttagtttcttcgatattagattttgtattacctatattcttgatgtagtactttgatgatttttccatggcccattctattaagtcttccaagttggcatcatccacatattgtgatagtaattctcggatatcagtagcggctaccgccattgatgtttgttcattggatgagtaactactaatgtatacattttccatttataacacttatgtattaactttgttcatttatattttttcattattatgttgatattaacaaaagtgaatatatatatgttaataattgtattgtggttatacggctacaattttataatgagtgaaagtcagtgtccgatgatcaatgacgatagctttactctgaaaagaaagtatcaaatcgatagtgcggagtcaacaataaaaatggataagaagaggataaagtttcagaatagagccaaaatggtaaaagaaataaatcagacaataagagcagcacaaactcattacgagacattgaaactaggatacataaaatttaagagaatgattaggactactactctagaagatatagcaccatctattccaaataatcagaaaacttataaactattctcggacatttcagccatcggcaaagcatcacagaatccgagtaagatggtatatgctctgctgctttacatgtttcccaatttgtttggagatgatcatagattcattcgttatagaatgcatccaatgagtaaaatcaaacacaagatcttctctcctttcaaacttaatcttattagaatattagtggaagaaagattctataataatgaatgcagatctaataaatggaaaataattggaacacaagttgataaaatgttgatagctgaatctgataaatatacaatagatgcaaggtataacctaaaacccatgtatagaatcaagggagaatctgaagaagataccctcttcatcaaacagatggtagaacaatgtgtgacatcccaggaattggtggaaaaagtgttgaagatactgtttagagatttgttcaagagtggagaatacaaagcgtacagatacgatgatgatgtagaaaatggattcattggattggatacactaaaattaaacattgttcatgatatagttgaaccatgtatgcctgttcgtaggccagtggctaagatactgtgtaaagaaatggtaaataaatactttgagaatccgctacatattattggtaaaaatcttcaagagtgcattgactttgttagtgaataggcatttcatctttctccaatactaattcaaattgttaaattaataatggatagtataaatagttattagttataagatagtaaaaataattattagaataagagtgtagtatcatagataactctcttctataaaaatggattttattcgtagaaagtatcttatatacacagtagaaaataatatagattttttaaaggatgatacattaagtaaagtaaacaattttaccctcaatcatgtactagctctcaagtatctagttagcaattttcctcaacacgttattactaaggatgtattagctaataccaatttttttgttttcatacatatggtacgatgttgtaaagtgtacgaagcggttttacgacacgcatttgatgcacccacgttgtacgttaaagcattgactaagaattatttatcgtttagtaacacaatacaatcgtacaaggaaaccgtgcataaactaacacaagatgaaaaatttttagaggttgccgaatacatggacgaattaggagaacttataggcgtaaattatgacttagttcttaatccattatttcacggaggggaacccatcaaagatatggaaatcatttttttaaaactgtttaagaaaacagacttcaaagttgttaaaaaattaagtgttataagattacttatttgggcatacctaagcaagaaagatacaggcatagagtttgcggataatgatagacaagatatatatactctatttcaacaaactggtagaatcgtccatagcaatctaacagaaacgtttagagattatatctttcccggagataagactagctattgggtgtggttaaacgaaagtatagctaatgatgcggatattgttcttaatagacacgccattaccatgtatgataaaattcttagttatatatactctgagataaaacaaggacgcgttaataaaaacatgcttaagttagtttatatctttgagcctgaaaaagatatcagagaacttctgctagaaatcatatatgatattcctggagatatcctatctattattgatgcaaaaaacgacgattggaaaaaatattttattagtttttataaagctaattttattaacggtaatacatttattagtgatagaacgtttaacgaggacttattcagagttgttgttcaaatagatcccgaatatttcgataatgaacgaattatgtctttattctctacgagtgctgcggacattaaacgatttgatgagttagatattaataacagttatatatctaatataatttatgaggtgaacgatatcacattagatacaatggatgatatgaagaagtgtcaaatctttaacgaggatacgtcgtattatgttaaggaatacaatacatacctgtttttgcacgagtcggatcccatggtcatagagaacggaatactaaagaaactgtcatctataaaatccaagagtagacggctgaacttgtttagcaaaaacattttaaaatattatttagacggacaattggctcgtctaggtcttgtgttagatgattataaaggagacttgttagttaaaatgataaaccatcttaagtctgtggaggatgtatccgcattcgttcgattttctacagataaaaaccctagtattcttccatcgctaatcaaaactattttagctagttataatatttccatcatcgtcttatttcaaaggtttttgagagataatctatatcatgtagaagaattcttggataaaagcatccatctaaccaagacggataagaaatatatacttcaattgataagacacggtagatcatagaacagaccaaatatattattaataatttgtatatacatagatataattatcacacatttttgataaatgggaactgctgcaacaattcagactcccaccaaattaatgaataaagaaaatgcagaaatgattttggaaaaaattgttgatcatatagttatgtatattagtgacgaatcaagtgattcagaaaataatcctgaatatattgattttcgtaacagatacgaagactatagatctctcattataaaaagtgatcacgagtttgtaaagctatgtaaaaatcatgcggagaaaagttctccagaaacgcaacaaatgattatcaaacacatatacgaacaatatcttattccagtatctgaagtactattaaaacctataatgtccatgggtgacataattacatataacggatgtaaagacaatgaatggatgctagaacaactctctaccctaaactttaacaatctccgcacatggaactcatgtagcataggcaatgtaacgcgtctgttttatacattttttagttatctgatgaaagataaactaaatatataagtataatcccattctaatactttaacctgatgtattagcatcttattagaatattaacctaactaaaagacataacataaaaactcattacatagttgataaaaagcggtaggatataaatattatggctgccaccgttccgcgttttgacgacgtgtacaaaaatgcacaaagaagaattctagatcaagaaacattttttagtagaggtctaagtagaccgttaatgaaaaacacatatctatttgataattacgcgtatggatggataccagaaactgcaatttggagtagtagatacgcaaacttagatgcaagtgactattatcccatttcgttgggattacttaaaaagttcgagtttctcatgtctctatataaaggtcctattccagtatacgaagaaaaagtaaatactgaattcattgctaatggatctttctccggtagatacgtatcatatcttagaaagttttctgctcttccaacaaacgagtttattagttttttgttactgacttccattccaatctataatatcttgttctggtttaaaaatactcagtttgatattactaaacacacattattcagatacgtctatacagataatgccaaacacctggcgttggctaggtatatgtatcaaacaggagactataagcctttgtttagtcgtctcaaagagaattatatatttaccggtcccgttccaatatgtatcaaagatatagatcaccctaatcttagtagagcaagaagtccatccgattatgagacattagctaatattagtactatattgtactttaccaagtatgatccggtattaatgtttttattgttttacgtacctgggtattcaattactacaaaaattactccagccgtagaatatctaatggataaactgaatctaacaaagagcgacgtacaactgttgtaaattattttatgcttcgtaaaatgtaggttttgaaccaaacattctttcaaagaatgagatgcataaaactttattatccaatagattgactatttcggacgtcaatcgtttaaagtaaacttcgtaaaatattctttgatcactgccgagtttaaaacttctatcgataattgtttcatatgttttaatatttacaagttttttggtccatggtccattaggacaaatatatgcaaaataatatcgttctccaagttctatagtctctggattatttttattatattcagtaaccaaatacatattagggttatctgcggatttataatttgagtgatgcattcgactcaacataaataattctagaggagacgatctactatcaaattcggatcgtaaatctgtttctaaagaacggagaatatctatacatacctgattagaattcatccgtccttcagacaacatctcagacagtctggtcttgtatgtcttaatcatattcttatgaaacttggaaacatctcttctagtttcactagtacctttattaattctctcaggtacagattttgaattcgacgatgctgagtatttcatcgttgtatatttcttcttcgattgcataatcagattcttatataccgcctcaaactctattttaaaattattaaacaatactctattattaatcagtcgttctaactctttcgctatttctatagacttatctacatcttgactgtctatctctgtaaacacggagtcggtatctccatacacgctacgaaaacgaaatctgtaatctataggcaacgatgttttcacaatcggattaatatctctatcgtccatataaaatggattacttaatggattggcaaaccgtaacataccgttagataactctgctccatttagtaccgattctagatacaagatcattctacgtcctatggatgtgcaactcttagccgaagcgtatgagtatagagcactatttctaaatcccatcagaccatatactgagttggctactatcttgtacgtatattgcatggaatcatagatggccttttcagttgaactggtagcctgttttagcatctttttatatctggctctctctgccaaaaatgttcttaatagtctaggaatggttccttctatcgatctatcgaaaattgctatttcagagatgaggttcggtagtctaggttcacaatgaaccgtaatatatctaggaggtggatatttctgaagcaatagctgattatttatttcttcttccaatctattggtactaacaacgacaccgactaatgtttccggagatagatttccaaagatacacacattaggatacagactgttataatcaaagattaatacattattactaaacattttttgttttggagcaaataccttaccgccttcataaggaaacttttgttttgtttctgatctaactaagatagttttagtttccaacaatagctttaacagtggacccttgatgactgtactcgctctatattcgaataccatggattgaggaagcacatatgttgacgcacccgcgtctgtttttgtttctactccataatactcccacaaatactgacacaaacaagcatcatgaatacagtatctagccatatctaaagctatgtttagattataatccttatacatctgagctaaatcaacgtcatcctttccgaaagataatttatatgtatcattaggtaaagtaggacataatagtacgactttaaatccattttcccaaatatctttacgaattactttacatataatatcctcatcaacagtcacataattacctgtggttaaaacctttgcaaatgcagcggctttgcctttcgcgtctgtagtatcgtcaccgatgaacgtcatttctctaactcctctatttaatactttacccatgcaactgaacgcgttcttggatatagaatccaatttgtacgaatccaatttttcaaatttttgaatgaatgaatatagatcgaaaaatatagttccattattgttattaacgtgaaacgtagtattggccatgccgcctactcccttatgactagactgatttctctcataaatacagagatgtacagcttcctttttgtccggagatctaaagataatcttctctcctgttaataactctagacgattagtaatatatctcagatcaaagttatgtccgttaaaggtaacgacgtagtcgaacgttagttccaacaattgtttagctattcgtaacaaaactatttcagaacatagaactagttctcgttcgtaatccatttccattagtgactgtatcctcaaacatcctctatcgacggcttcttgtatttcctgttccgttaacatctcttcattaatgagcgtaaacaataatcgtttaccacttaaatcgatataacagtaacttgtatgcgagattgggttaataaatacagaaggaaacttcttatcgaagtgacactctatatctagaaataagtacgatcttgggatatcgaatctaggtatttttttagcgaaacagttacgtggatcgtcacaatgataacatccattgttaatctttgtcaaatattgctcgtccaacgagtaacatccgtctggagatatcccgttagaaatataaaaccaactaatattgagaaattcatccatggtggcattttgtatgctgcgtttctttggctcttctatcaaccacatatctgcgacggagcattttctatctttaatatctagattataacttattgtctcgtcaatgtctatagttctcatctttcccaacggcctcgcattaaatggaggaggagacaatgactgatatatttcgtccgtcactacgtaataaaagtaatgaggaaatcgtataaatacggtctcaccatttcgacatctggatttcagatataaaaatctgttttcaccgtgactttcaaaccaattaatgcaccgaacatccatttatagaatttagaaatatattttcatttaaatgaatcccaaacattggggaagagccgtatggaccattatttttatagtactttcgcaagcgggtttagacggcaacatagaagcgtgtaaacgaaaactatatactatagttagcactcttccatgtcctgcatgtagacggcacgcgactatcgctatagaggacaataatgtcatgtctagcgatgatctgaattatatttattattttttcatcagattatttaacaatttggcatctgatcccaaatacgcgatcgatgtgacaaaggttaaccctttataaacttaacccattataaaacttatgattagtcacaactgaaataaccgcgtgattattttttggtataattctacacggcatggtttctgtgactatgaattcaacccccgttacattagtgaaatctttaacaaacagcaagggttcgtcaaagacataaaactcattgtttacaatcgaaatagaccccctatcacacttaaaataaaaaatatccttatcctttaccaccaaataaaattctgattggtcaatgtgaatgtattcacttaacagttccacaaatttatttattaactccgaggcacatacatcgtcggtattttttatggcaaactttactcttccagcatccgtttctaaaaaaatattaacgagttccatttatatcatccaatattattgaaatgacgttgatggacagatgatacaaataagaaggtacggtacctttgtccaccatctcctccaattcatgctctattttgtcattaactttaatgtatgaaaacagtacgccacatgcttccatgacagtgtgtaacactttggatacaaaatgtttgacattagtataattgttcaagactgtcaatctataatagatagtagctataatatattctatgatggtattgaagaagatgacaaccttggcatattgatcatttaacacagacatggtatcaacagatagcttgaatgaaagagaatcagtaattggaataagcgtcttctcgatagagtgtccgtataccaacatgtctgatattttgatgtattccattaaattatttagttttttctttttattctcgttaaacagcatttctgtcaacggaccccaacatcgttgaccgattaagttttgattgatttttccgtgtaaggcgtatctagtcagatcgtatagcctatccaataatccatcatctgtgcgtagatcacatcgtacactttttaattctctatagaagagcgacagacatctggagcaattacagacagcaatttctttattctctacagatgtaagatacttgaagacattcctatgatgatgcagaattttggataacacggtattgatggtatctgttaccataattcctttgatggctgatagtgtcagagcacaagatttccaatctttgacaatttttagcaccattatctttgttttgatatctatatcagacagcatggtgcgtctgacaacacagggattaagacggaaagatgaaatgattctctcaacatcttcaatagataccttgctattttttctggcattatctatatgtgcgagaatatcctctagagaatcagtatcctttttgatgatagtggatctcaatgacatgggacgtttaaaccttcttattctatcaccagattgcatggtgatttgtcttctttcttttatcataatgtaatctctaaattcatcggcaaattgtctatatctaaaatcataatatgagatgtttacctctacaaatatctgttcgtccaatgttagagtatttacatcagttttgtattccaaattaaacatggcaacggatttaattttatattcctctattaagtcctcgtcgataataacagaatgtagataatcatttaatccatcgtacatggttggaagatgcttgttgacaaaatctttaattgtcttgatgaaggtgggactatatctaacatcttgattaataaaatttataacattgtccataggatactttgtaactagttttatacacatctcttcatcggtaagtttagacagaatatcgtgaacaggtggtatattatattcatcagatatacgaagaacaatgtccaaatctatattgtttaatatattatatagatgtagcgtagctcctacaggaatatctttaactaagtcaatgatttcatcaaccgttagatctattttaaagttaatcatataggcattgatttttaaaaggtatgtagccttgactacattctcattaattaaccattccaagtcactgtgtgtaagaagattatattctatcataagcttgactacatttggtcccgataccattaaagaattcttatgatataaggaaacagcttttaggtactcatctactctacaagaattttggagagccttaacgatatcagtgacgtttattatttcaggaggaaaaaacctaacattgagaatatcggaattaatagcttccagatacagtgattttggcaatagtccgtgtaatccataatccagtaacacgagctggtgcttgctagacaccttttcaatgtttaatttttttgaaataagctttgataaagccttcctcgcaaattccggatacatgaacatgtcggcgacatgattaagtattgttttttcattatttttatattttctcaacaagttctcaataccccaatagatgatagaatatcacccaatgcgtccatgttgtctatttccaacaggtcgctatatccaccaatagaagtttttccaaaaaagattctaggaacagttctaccaccagtaatttgttcaaaataatcccgcaattcattttcgggtttaaattctttaatatcgacaatttcatacgctcctcttttgaaactaaacttatttagaatatccagtgcatttctacaaaaaggacatgtatacttgacaaaaattgtcactttgttattggccaacctttgttgtacaaattcctcggccattttaatatttaagtgatataaaactatctcgacttatttaactctttagtcgagatatatggacgcagatagctatatgatagccaactacagaaggcaaacgctataaaaaacataattacgacgagcatatttataaatatttttattcagcattacttgatatagtaatattaggcacagtcaaacattcaaccactctcgatacattaactctctcattttctttaacaaattctgcaatatcttcgtaaaaagattcttgaaactttttagaatatctatcgactctagatgaaatagcgttcgtcaacatactatgttttgtatacataaaggcgcccattttaacagtttctagtgacaaaatgctagcgatcctaggatcctttagaatcacatagattgacgattcgtctctcttagtaactctagtaaaataatcatacaatctagtacgcgaaataatattatccttgacttgaggagatctaaacaatctagttttgagaacatcgataagttcatcgggaatgacatacatactatctttaatagaactcttttcatccagttgaatggattcgtccttaaccaactgattaatgagatcttctattttatcattttccagatgatatgtatgtccattaaagttaaattgtgtagcgcttctttttagtctagcagccaatactttaacatcactaatatcgatatacaaaggagatgatttatctatggtattaagaattcgtttttcgacatccgtcaaaaccaattcctttttgcctgtatcatccagttttccatcctttgtaaagaaattattttctactagactattaataagactgataaggattcctccataattgcacaatccaaactttttcacaaaactagactttacaagatctacaggaatgcgtacttcaggttttttagcttgtgattttttcttttgcggacattttcttgtgaccaactcatctaccatttcattgattttagcagtgaaataagctttcaatgcacgggcactgatactattgaaaacgagttgatcttcaaattccgccatttaagttcaccaaacaacttttaaatacaaatatatcaatagtagtagaataagaactataaaaaaaataataattaaccaataccaaccccaacaaccggtattattagttgatgtgactgttttctcatcacttagaacagatttaacaatttctataaagtctgtcaaatcatcttccggagaccccataaatacaccaaatatagcggcgtacaacttatccatttatacattgaatattggcttttctttatcgctatcttcatcatattcatcatcaatatcaacaagtcccagattacgagccagatcttcttctacattttcagtcattgatacacgttcactatctccagagagtccgataacgttagccaccacttctctatcaatgattagtttcttgagcgcgaaagtaatttttgtttccgttccggatctatagaagacgataggtgtgataattgccttggccaattgtctttctcttttactgagtgattctagttcaccttctatagatctgagaatggatgattctccagtcgaaacatattctaccatggatccgtttaatttgttgatgaagatggattcatccttaaatgttttctctgtaatagtttccaccgaaagactatgcaaagaatttggaatgcgttccttgtgcttaatgtttccatagacggcttctagaagttgatacaacataggactagccgcggtaacttttatttttagaaagtatccatcgcttctatcttgtttagatttatttttataaagtttagtctctccttccaacataataaaagtggaagtcatttgactagataaactatcagtaagttttatagagatagacgaacaattagcgtattgagaagcatttagtgtaacgtattcgatacattttgcattagatttactaatcgattttgcatactctataacacccgcacaagtctgtagagaatcgctagatgcagtaggtcttggtgaagtttcaactctcttcttgattaccttactcatgattaaacctaaataattgtactttgtaatataatgatatatattttcactttatctcatttgagaataaaaatgtttttgtttaaccactgcatgatgtacagatttcggaatcgcaaaccaccagtggttttattttatccttgtccaatgtgaattgaatgggagcggatgcgggtttcgtacgtagatagtacattcccgtttttagaccgagactccatccgtaaaaatgcatactcgttagtttggaataactcggatctgctatatggatattcatagattgactttgatcgatgaaggctcccctgtctgcagccatttttatgatcgtcttttgtggaatttcccaaatagttttataaactcgcttaatatcttctggaaggtttgtattctgaatggatccaccatctgccataatcctattcttgatctcatcattccataattttctctcggttaaaactctaaggagatgcggattaactacttgaaattctccagacaatactctccgagtgtaaatattactggtatacggttccaccgactcattatttcccaaaatttgagcagttgatgcagtcggcataggtgccaccaataaactatttctaagaccgtatgttctgattttatcttttagaggttcccaattccaaagatccgacggtacaacattccaaagatcatattgtagaataccgttactggcgtacgatcctacatatgtatcgtatggtccttccttctcagctagttcacaactcgcctctaatgcaccgtaataaatggtttcgaagatcttcttatttagatcttgtgcttccaggctatcaaatggataatttaagagaataaacgcgtccgctaatccttgaacaccaataccgataggtctatgtctcttattagagatttcagcttctggaataggataataattaatatctataattttattgagatttctgacaattactttgaccacatccttcagtttgagaaaatcaaatcgcccatctattacaaacatgttcaaggcaacagatgccagattacaaacggctacctcattagcatccgcatattgtattatctcagtgcaaagattactacacttgatagttcctaaattttgttgattactctttttgttacacgcatccttataaagaatgaatggagtaccagtttcaatctgagattctataatcgctttccagacgactcgagcctttattatagatttgtatctcctttctctttcgtatagtgtatacaatcgttcgaactcgtctccccaaacattgtccaatccaggacattcatccggacacatcaacgaccactctccgtcatccttcactcgtttcataaagagatcaggaatccaaagagctataaatagatctctggttctatgttcctcgtttcctgtattctttttaagatcgaggaacgccataatatcagaatgccacggttccaagtatatggccataactccaggccgtttgtttcctccctgatctatgtatctagcggtgttattataaactctcaacattggaataataccgtttgatataccattggtaccggagatatagcttccactggcacgaatattactaattgatagacctattccccctgccattttagagattaatgcgcatcgttttaacgtgtcatagataccctctatgctatcatcgatcatgttaagtagaaaacagctagacatttggtgacgactagttcccgcattaaataaggtaggagaagcgtgcgtaaaccatttttcagaaagtagattgtacgtctcaatagctgagtctatatcccattgatgaattcctactgcgacacgcattaacatgtgctgaggtctttcaacgatcttgttgtttattttcaacaagtaggatttttccaaagttttaaaaccaaaatagttgtatgaaaagtctcgttcgtaaataataaccgagttgagtttatccttatatttgttaactatatccatggtgatacttgaaataatcggagaatgtttcccatttttaggattaacatagttgaataaatcctccatcacttcactaaatagtttttttgtttccttgtgtagatttgatacggctattctggcggctagaatggcataatccggatgttgtgtagtacaagtggctgctatttcggctgccagagtgtccaattctaccgttgttactccattatatattccttgaataaccttcatagctattttaataggatctatatgatccgtgtttaagccataacataattttctaatacgagacgtgattttatcaaacatgacattttccttgtatccatttcgtttaatgacaaacatttttgttggtgtaataaaaaaattatttaacttttcattaatagggatttgacgtatgtagcgtacaaaatgatcgttcctggtatatagataaagagtcctatatatttgaaaatcgttacggctcgattaaactttaatgattgcatagtgaatatatcattaggatttaactccttgactatcatggcggcgccagaaattaccatcaaaagcattaatacagttatgccgatcgcagttaaaacggttatagcatccaccatttatatctaaaaattagatcaaagaatatgtgacaaagtcctagttgtatactgagaattgacgaaacaatgtttcttacatatttttttcttattagtaactgacttaatagtaggaactggaaagctagacttgattattctataagtatagatacccttccagataatgttctctttgataaaagttccagaaaatgtagaattttttaaaaagttatcttttgctattaccaagattgtgtttagacgcttattattaatatgagtgatgaaatccacaccgcctctagatatcgcctttatttccacattagatggtaaatccaatagtgaaactatctttttaggaatgtatggactcgcgtttagaggagtgaacgtcttgggcgtcggaaaggatgattcgtcaaacgaataaacaatttcacaaatggatgttaatgtattagtaggaaattttttgacgctagtggaattgaagattctaatggatgatgttctacctatttcatccgataacatgttaatttccgacaccaacggttttaatatttcgatgatatacggtagtctctctttcggacttatatagcttattccacaatacgagtcattatatactccaaaaaacaaaataactagtataaaatctgtatcgaatgggaaaaacgaaattatcgacataggtatagaatccggaacattgaacgtattaatacttaattctttttctgtggtaagtaccgataggttattgacattgtatggttttaaatattctataacttgagacttgatagatattagtgatgaattgaaaattatttttatcaccacgtgtgtttcaggatcatcgtcgacgcccgtcaaccaaccgaatggagtaaaataaatatcattaatatatgctctagatattagtatttttattaatcctttgattatcatcttctcgtaggcgaatgattccatgatcaagagtgatttgagaacatcctccggagtattaatgggcttagtaaacagtccatcgttgcaataataaaagttatccaagttaaaggatattatgcattcgtttaaagatatcacctcatctgacggagacaattttttggtaggttttagagactttgaagctacttgtttaacaaagttattcatcgtcgtctactattctatttaattttgtagttaatttatcacatatcacattaattgactttttggtccatttttccatacgtttatattcttttaatcctgcgttatccgtttccgttatatccagggatagatcttgcaagttaaatagaatgctcttaaataatgtcattttcttatccgctaaaaatttaaagaatgtataaacctttttcagagatttgaaactcttaggtggtgtcctagtacacaatatcataaacaaactaataaacattccacattcagattccaacagctgattaacttccacattaatacagcctattttcgctccaaatgtacattcgaaaaatctgaataaaacatcgatgtcacaatttgtattatccaatacagaatgtttgtgattcgtgttaaaaccatcggagaaggaatagaaataaaaattattatagtggtggaattcagttggaatattgcctccggagtcataaaaggatactaaacattgttttttatcataaattacacatttccaatgagacaaataacaaaatccaaacattacaaatctagaggtagaacttttaattttgtctttaagtatatacgataagatatgtttattcataaacgcgtcaaatttttcatgaatcgctaaggagtttaagaatctcatgtcaaattgtcctatataatccacttcggatccataagcaaactgagagactaagttcttaatacttcgattgctcatccaggctcctctctcaggctctattttcatcttgacgacctttggattttcaccagtatgtattcctttacgtgataaatcatcgattttcaaatccatttgtgagaagtctatcgccttagatactttttcccgtagtcgaggtttaaaaaaatacgctaacggtatactagtaggtaactcaaagacatcatatatagaatggtaacgcgtctttaactcgtcggttaactctttcttttgatcgagttcgtcgctactattgggtctgctcaggtgccccgactctactagttccaacatcataccgataggaatacaagacactttgccggcggttgtagatttatcatatttttccactacatatccgttacaatttgttaaaaatttagatacatctatattgctacataatccagctagtgaatatatatgacataataaattggtaaatcctagttctggtattttactaattactaaatctgtatatctttccatttatcatggaaaagaatttaccagatatcttcttttttccaaactgcgttaatgtattctcttacaaatattcacaagatgaattcagtaatatgagtaaaacggaacgtgatagtttctcattggccgtgtttccagttataaaacatagatggcataacgcacacgttgtaaaacataaaggaatatacaaagttagtacagaagcacgtggaaaaaaagtatctcctccatcactaggaaaacccgcacacataaacctaaccgcgaagcaatatatatacagtgaacacacaataagctttgaatgttatagttttctaaaatgtataacaaatacagaaatcaattcgttcgatgagtatatattaagaggactattagaagctggtaatagtttacagatattttccaattccgtaggtaaacgaacagatactataggtgtactagggaataagtatccatttagcaaaattccattggcctcattaactcctaaagcacaacgagagatattttcagcgtggatttctcatagacctgtagttttaactggaggaactggagtgggtaagacgtcacaggtacccaagttattgctttggtttaattatttatttggtggattctctactctagataaaatcactgactttcacgaaagaccagtcattctatctcttcctaggatagctttagttagattgcatagcaataccattttaaaatcattgggatttaaggtactagatggatctcctatttctttacggtacggatctataccggaagaattaataaacaaacaaccaaaaaaatatggaattgtattttctacccataagttatctctaacaaaactatttagttatggcactcttattatagacgaagttcatgagcatgatcaaataggagatattattatagcagtagcgagaaagcatcatacgaaaatagattctatgtttttaatgactgccacattagaggatgaccgagaacggctaaaagtatttttacctaatcccgcatttatacatattcctggagatacactgtttaaaattagcgaggtatttattcataataagataaatccatcttccagaatggcatacatagaagaagaaaagagaaatttagttactgctatacagatgtatactcctcctgatggatcatccggtatagtctttgtggcatccgttgcacagtgtcacgaatataaatcatatttagaaaaaagattaccgtatgatatgtatattattcatggtaaggtcttagatatagacgaaatattagaaaaagtgtattcatcacctaatgtatcgataattatttctactccttatttggaatccagcgttactatacgcaatgttacacacatttatgatatgggtagagtttttgtccccgctccttttggaggatcgcaacaatttatttctaaatctatgagagatcaacgaaaaggaagagtaggaagagttaatcctgggacatacgtctatttctatgatctgtcttatatgaagtctatacagcgaatagattcagaatttctacataattatatattgtacgctaataagtttaatctaacactccccgaagatttgtttataatccctacaaatttggatattctatggcgtacaaaggaatatatagactcgttcgatattagtacagaaacatggaataaattattatccaattattatatgaagatgatagagtatgctaaactttatgtactaagtcctattctcgctgaggagttggataactttgagaggacgggagaattaactagtattgtacgagaagccattttatctctaaatttacgaattaagattttaaattttaaacataaagatgatgatacgtatatacacttttgtaaaatattattcggtgtctataacggaacaaacgctactatatattatcatagacctctaacgggatatatgaatatgatttcagatactatatttgttcctgtagataataactaaaaatcaaactctaatgaccacatctttttttagagatgaaaaattttccacatctccttttgtagacacgactaaacattttgcagaaaaaagtttattagtgtttagataatcgtatacttcatcagtgtagatagtaaatgtgaacagataaaaggtattcttgctcaatagattggtaaattccatagaatatattaatcctttcttcttgagatcccacatcatttcaaccagagacgttttatccaatgatttacctcgtactataccacatacaaaactagattttgcagtgacgtcgtacctggtattcctaccaaacaaaattttacttttagttcttttagaaaattctaaggtagaatctctatttgccaatatgtcatctatggaattaccactagcaaaaaatgatagaaatatatattgatacatcgcagctggttttgatctactatactttaaaaacgaatcagattccataattgcctgtatatcatcagctgaaaaactatgttttacacgtattccttcggcatttctttttaatgatatatcttgtttagacaatgataaagttatcatgtccatgagagacgcgtctccgtatcgtataaatatttcattagatgttagacgcttcattaggggtatacttctataaggtttcttaatcagtccatcattggttgcgtcaagaactactatcggatgttgttgggtatctctagtgttacacatggccttactaaagtttgggtaaataactatgatatctctattaattatagatgcatatatttcattcgtcaaggatattagtatcgacttgctatcgtcattaatacgtgtaatgtaatcatataaatcatgcgatagccaaggaaaatttaaatagatgttcatcatataatcgtcgctataattcatattaatacgttgacattgactaatttgtaatatagcctcgccacgaagaaagctctcgtattcagtttcatcgataaaggataccgttaaatataactggttgccgatagtctcatagtctattaagtggtaagtttcgtacaaatacagaatccctaaaatattatctaatgttggattaatctttaccataactgtataaaatggagacggagtcataactattttaccgtttgtacttactggaatagatgaaggaataatctccggacatgctggtaaagacccaaatgtctgtttgaagaaatccaatgttccaggtcctaatctcttaacaaaaattacgatattcgatcccgatatcctttgcattctatttaccagcatatcacgaactatattaagattatctatcatgtctattctcccaccgttatataaatcgcctccgctaagaaacgttagtatatccatacaatggaatacttcatttctaaaatagtattcgttttctaattctttaatgtgaaatcgtatactagaaagggaaaaattatctttgagttttccgttagaaaagaaccacgaaactaatgttctgattgcgtccgattccgttgctgaattaatggatttacaccaaaaactcatataacttctagatgtagaagcattcgctaaaaaattagtagaatcaaaggatataagtagatgttccaacaagtgagcaattcccaagatttcatctatatcattctcgaatccgaaattagaaattcccaagtagatatcctttttcatccgatcgttgatgaaaatacgaactttattcggtaagacaatcatttactaaggagtaaaataggaagtaatgttcgtatgtcgttatcatcgtataaattaaaggtgtgttttttaccattaagtgacattataattttaccaatattggaattataatataggtgtatttgcgcactcgcgacggttgatgcatcggtaaatatagctgtatctaatgttctagtcggtatttcatcatttcgctgtctaataatagcgttttctctatctgtttccattacagctgcctgaagtttattggtcggataatatgtaaaataataagaaatacatacgaataacaaaaataaaataagatataataaagatgccatttagagatctaattttgttcaacttgtccaaattcctacttacagaagatgaggaatcgttggagatagtgtcttccttatgtagaggatttgaaatatcttatgatgacttgataacttactttccagataggaaataccataaatatatttataaagtatttgaacatgtagatttatcggaggaattaagtatggaattccatgatacaactctgagagatttagtctatcttagattgtacaagtattccaagtgtatacggccgtgttataaattaggagataatctaaaaggcatagttgttataaaggacaggaatatttatattagggaagcaaatgatgacttgatagaatatctcctcaaggaatacactcctcagatttatacatattctaatgagcgcgtccccataactggttcaaaattaattctttgtggattttctcaagttacatttatggcgtatacaacgtcgcatataacaacaaataaaaaggtagatgttctcgtttccaaaaaatgtatagatgaactagtcgatccaataaattatcaaatacttcaaaatttatttgataaaggaagcggaacaataaacaaaatactcaggaagatattttattcggtaacaggtggccaaactccataatttgctttttctatttcggattttagaatttccaaattcaccagcgatttatcggttttggtgaaatccaaggatttattaatgtccacaaatgccatttgttttgtctgtggattgtatttgaaaatggaaacgatgtagttagatagatgcgctgcaaagtttcctattagggttccgcgctttacgtcacccagcatacttgaatcaccatcctttaaaaaaaatgataagatatcaacatggagtatatcatactcggattttaattcttctactgcatcactgacattttcacaaatactacaatacggtttaccgaaaataatcagtacgttcttcatttatgggtatcaaaaacttaaaatcgttactgctggaaaataaatcactgacgatattagatgataatttatacaaagtatacaatggaatatttgtggatacaatgagtatttatatagccgtcgccaattgtgtcagaaacttagaagagttaactacggtattcataaaatacgtaaacggatgggtaaaaaagggagggcatgtaaccctttttatcgatagaggaagtataaaaattaaacaagacgttagagacaagagacgtaaatattctaaattaaccaaggacagaaaaatgttagaattagaaaagtgtacatccgaaatacaaaatgttaccggatttatggaagaagaaataaaggcagaaatgcaattaaaaatcgataaactcacatttcaaatatatttatctgattctgataacataaaaatatcattgaatgagatactaacacatttcaacaataatgagaatgttacattattttattgtgatgaacgagacgcagaattcgttatgtgtctcgaggctaaaacacatttctctaccacaggagaatggccgttgataataagtaccgatcaggatactatgctatttgcatctgctgataatcatcctaagatgataaaaaacttaactcaactgtttaaatttgttccctcggcagaggataactatttagcaaaattaacggcgttagtgaatggatgtgatttctttcctggactctatggggcatctataacacccaccaacttaaacaaaatacaattgtttagtgattttacaatcgataatatagtcactagtttggcaattaaaaattattatagaaagactaactctaccgtagacgtgcgtaatattgttacgtttataaacgattacgctaatttagacgatgtctactcgtatattcctccttgtcaatgcactgttcaagaatttatattttccgcattagatgaaaaatggaatgaatttaaatcatcttatttagagaccgttccgttaccctgtcaattaatgtacgcgttagaaccacgtaaggagattgatgtttcagaagttaaaactttatcatcttatatagatttcgaaaatactaaatcagatatcgatgttataaaatctatatcctcgatcttcggatattctaacgaaaactgtaacacgatagtattcggcatctataaggataatttactactgagtataaataattcattttactttaacgatagtctgttaataaccaatactaaaagtgataatataataaatataggttactagattaaaaatggtgttccaactcgtgtgctctacgtgcggcaaagatatttctcacgaacgatataaattgattatacgaaaaaaatcattaaaggatgtactcgtcagtgtaaagaacgaatgttgtaggttaaaattatctacacaaatagaacctcaacgtaacttaacagtgcaacctctattggatataaactaatatggatccggttaattttattaagacatatgcgcctagaggttctattatttttattaattataccatgtcattaacaagtcatttgaatccatcgatagaaaaacatgtgggtatttattatggtacgttattatcggaacacttggtagttgaatctacctatagaaaaggagttcgaatagtcccattggatagtttttttgaaggatatcttagtgcaaaagtatacatgttagagaatattcaagttatgaaaatagcagctgatacgtcattaactttattgggtattccgtatggatttggtcataatagaatgtattgttttaaattggtagctgaatgttataaaaatgccggtgttgaaacatcgtctaaacgaatattgggtaaaaatatttttctgagccaaaacttcacagacgataatagatggataaagatatatgattctaataatttaacattttggcaaattgattaccttaaagggtgagttaatatgcataactactcctccgttgttttttccctcgttctttttcttaacgttgtttgccatcactctcataatgtaaagatattctaaaatggtaaacttttgcatatcggacgcagaaattggtataaatgttgtaattgtattatttcccgtcaatggactagtcacagctccatcagttttatatcctttagagtatttctcactcgtgtctaacattctagagcattccatgatctgtttatcgttgatattggccggaaagatagattttttattttttattatattactattggcaattgtagatataacttctggtaaatatttttctaccttttcaatctcttctattttcaagccggctatatattctgctatattgttgctagtatcaataccttttcttgctaagaagtcatatgtggtattcactatatcagttttaactggtagttccattagcctttccacttctgcagaataatcagaaattggttctttaccagaaaatccagctactataataggctcaccgatgatcattggcaaaatcctatattgtaccagattaatgagagcatatttcatttccaataattctgctagttcttgagacattgatttatttgatgaatctagttggttctctagatactctaccatttctgccgcatacaataacttgttagataaaatcagggttatcaaagtgtttagcgtggctagaatagtgggcttgcatgtattaaagaatgcggtagtatgagtaaaccgttttaacgaattatatagtctccagaaatctgtggcgttacatacatgagccgaatgacatcgaagattgtccaatatttttaatagctgctctttgtccattatttctatatttgactcgcaacaattgtagataccattaatcaccgattcctttttcgatgctggacaatagcacaattgtttagctttggactctatgtattcagaattaatagatatatctctcaatacagattgcactatacattttgaaactatgtcaaaaattgtagaacgacgctgttctgcagccatttaactttaaataatttacaaaaatttaaaatgagcatccgtataaaaatcgataaactgcgccaaattgtggcatatttttcagagttcagtgaagaagtgtctataaatgtagactcgacggatgagttaatgtatatttttgccgccttgggcggatctgtaaacatttgggcaattatacctctaagtgcatcagtgttttaccgaggagccgaaaatattgtgtttaatcttcctgtgtccaaggtaaaatcgtgtttgtgtagttttcacaatgatgccatcatagatatagaacctgatctggaaaataatctagtaaaactttctagttatcatgtagtaagtgtcgattgtaacaaggaactgatgcctattaggacagatactactatttgtctaagtatagatcaaaagaaatcttacgtgtttaattttcacaagtatgaagaaaaatgttgtggtagaaccgtcattcatctagaatggttgttgggctttatcaagtgtattagtcagcatcagcatctggctattatgtttaaagatgacaatattattatgaagactcctggtaatactgatgcgttttccagggaatattctatgactgaatgttctcaagaactacaaaagttttctttcaaaatagctatctcgtctctcaacaaactacgaggattcaaaaagagagtcaatgtttttgaaactagaatcgtaatggataatgacgataacattttaggaatgttgttttcggatagagttcaatcctttaagatcaacatctttatggcgtttttagattaatactttcaatgagataaatatgggtggcggagtaagtgttgagctccctaaacgggatccgcctccgggagtacccactgatgagatgttattaaacgtggataaaatgcatgacgtgatagctcccgctaagcttttagaatatgtgcatataggaccactagcaaaagataaagaggataaagtaaagaaaagatatccagagtttagattagtcaacacaggacccggtggtctttcggcattgttaagacaatcgtataatggaaccgcacccaattgctgtcgcacttttaatcgtactcattattggaagaaggatggaaagatatcagataagtatgaagagggtgcagtattagaatcgtgttggccagacgttcacgacactggaaaatgcgatgttgatttattcgactggtgtcagggggatacgttcgatagaaacatatgccatcagtggatcggttcagcctttaataggagtaatagaactgtagagggtcaacaatcgttaataaatctgtataataagatgcaaacattatgtagtaaagatgctagtgtaccaatatgcgaatcatttttgcattatttacgcgcacacaatacagaagatagcaaagagatgatcgattatattctaagacaacagtctgcggactttaaacagaaatatatgagatgtagttatcccactagagataagttagaagagtcattaaaatatgcggaacctcgagaatgttgggatccagagtgttcgaatgccaatgttaatttcttactaacacgtaattataataatttaggactttgcaatattgtacgatgtaataccagcgtgaacaacttacagatggataaaacttcctcattaagattgtcatgtggattaagcaatagtgatagattttctactgttcccgtcaatagagcaaaagtagttcaacataatattaaacactcgttcgacctaaaattgcatttgatcagtttattatctctcttggtaatatggatactaattgtagctatttaaatgggtgccgcggcaagcatacagacgacggtgaatacactcagcgaacgtatctcgtctaaattagaacaagaagcgaacgctagtgctcaaacaaaatgtgatatagaaatcggaaatttttatatccgacaaaaccatggatgtaacctcactgttaaaaatatgtgctctgcggacgcggatgctcagttggatgctgtgttatcagccgctacagaaacatatagtggattaacaccggaacaaaaagcatacgtgccagctatgtttactgctgcgttaaacattcagacgagtgtaaacactgttgttagagattttgaaaattatgtgaaacagacttgtaattctagcgcggtcgtcgataacaaattaaagatacaaaacgtaatcatagatgaatgttacggagccccaggatctccaacaaatttggaatttattaatacaggatctagcaaaggaaattgtgccattaaagcgttgatgcaattgacgactaaggccactactcaaatagcacctagacaagttgctggtacaggagttcagttttatatgattgttatcggtgttataatattggcagcgttgtttatgtactatgccaagcgtatgttgttcacatccaccaatgataaaatcaaacttattttagccaataaggaaaacgtccattggactacttacatggacacattctttagaacttctccgatggttattgctaccacggatatgcaaaactgaaaatatattgataatattttaatagattaacatggaagttatcgctgatcgtctagacgatatagtgaaacaaaatatagcggatgaaaaatttgtagattttgttatacacggtctagagcatcaatgtcctgctatacttcgaccattaattaggttgtttattgatatactattatttgttatagtaatttatatttttacggtacgtctagtaagtagaaattatcaaatgttgttggtggtgctagtcatcacattaactattttttattactttatactataatagtactagactgacttctaacaaacatctcacctgccataaataaatgcttgatattaaagtcttctatttctaacactattccatctgtggaaaataatactctgacattatcgctaattgacacatcggtgagtgatatgcctataaagtaataatcttctttgggcacatataccagtgtaccaggttctaacaacctatttactggtgctcctgtagcatactttttctttaccttgagaatatccatcgtttgcttggtcaatagcgatatgtgattttttatcaaccactcaaaaaagtaattggagtgttcatatcctctacgggctattgtctcatggccgtgtatgaaatttaagtaacacgactgtggtagatttgttctatagagccgattgccgcaaatagatagaactaccaatatgtctgtacaaatgttaaacattaattgattaacagaaaaaacaatgttcgttctgggaatagaaaccagatcaaaacaaaattcgttagaatatatgccacgtttatacatggaatataaaataactacagtttgaaaaataacagtatcatttaaacatttaacttgcggggttaatctcacaactttactgtttttgaactgttcaaaatatagcatcgatccgtgagaaatacgtttagccgcctttaatagaggaaatcccaccgcctttctggatctcaccaacgacgatagttctgaccagcaactcatttcttcatcatccacctgttttaacatataataggcaggagatagatatccgtcattgcaatattccttctcgtaggcacacaatctaatattgataaaatctccattctcttctctgcatttattatcttgtctcggtggctgattaggctgtggtcttggtttaggccttggtctatcgttgttgaatctattttggtcattaaatctttcatttcttcctggtatatttctatcacctcgtttggttggatttttgtctatattatcgtttgtaacatcggtacgggtattcatttatcacaaaaaaaacttctctaaatgagtctactgctagaaaacctcatcgaagaagataccatattttttgcaggaagtatatctgagtatgatgatttacaaatggttattgccggcgcaaaatccaaatttccaagatctatgctttctatttttaatatagtacctagaacgatgtcaaaatatgagttggagttgattcataacgaaaatatcacaggagcaatgtttaccacaatgtataatataagaaacaatttgggtctaggagatgataaactaactattgaagccattgaaaactatttcttggatcctaacaatgaagttatgcctcttattattaataatacggatatgactgccgtcattcctaaaaaaagtggtaggagaaagaataagaacatggttatcttccgtcaaggatcatcacctatcttgtgcattttcgaaactcgtaaaaagattaatatttataaagaaaatatggaatccgcgtcgactgagtatacacctatcggagacaacaaggctttgatatctaaatatgcgggaattaatgtcctgaatgtgtattctccttccacatccataagattgaatgccatttacggattcaccaataaaaataaactagagaaacttagtactaataaggaactagaatcgtatagttctagccctcttcaagaacccattaggttaaatgattttctgggactattggaatgtgttaaaaagaatattcctctaacagatattccgacaaaggattgattactataaatggagaatgttcctaatgtatactttaatcctgtgtttatagagcccacgtttaaacattctttattaagtgtttataaacacagattaatagttttatttgaagtattcgttgtattcattctaatatatgtattttttagatctgaattaaatatgttcttcatgcctaaacgaaaaatacccgatcctattgatagattacgacgtgctaatctagcgtgtgaagacgataaattaatgatctatggattaccatggatgacaactcaaacatctgcgttatcaataaatagtaaaccgatagtgtataaagattgtgcaaagcttttgcgatcaataaatggatcacaaccagtatctcttaacgatgttcttcgcagatgatgattcattttttaagtatttggctagtcaagatgatgaatcttcattatctgatatattgcaaatcactcaatatctagactttctgttattattattgatccaatcaaaaaataaattagaagccgtgggtcattgttatgaatctctttcagaggaatacagacaattgacaaaattcacagactttcaagattttaaaaaactgtttaacaaggtccctattgttacagatggaagggtcaaacttaataaaggatatttgttcgactttgtgattagtttgatgcgattcaaaaaagaatcctctctagctaccaccgcaatagatcctgttagatacatagatcctcgtcgcgatatcgcattttctaacgtgatggatatattaaagtcgaataaagtgaacaataattaattctttattgtcatcatgaacggcggacatattcagttgataatcggccccatgttttcaggtaaaagtacagaattaattagacgagttagacgttatcaaatagctcaatataaatgcgtgactataaaatattctaacgataatagatacggaacgggactatggacgcatgataagaataattttgaagcattggaagcaactaaactatgtgatgtcttggaatcaattacagatttctccgtgataggtatcgatgaaggacagttctttccagacattgtttaattctgtgagcgtatggcaaacgaaggaaaaatagttatagtagccgcactcgatgggacatttcaacgtaaaccgtttaataatattttgaatcttattccattatctgaaatggtggtaaaactaactgctgtgtgtatgaaatgctttaaggaggcttccttttctaaacgattgggtgaggaaaccgagatagagataataggaggtaatgatatgtatcaatcggtgtgtagaaagtgttacgtcggctcataatattatattttttatctaaaaaactaaaaataaacattgattaaattttaatataatacttaaaaatggatgttgtgtcgttagataaaccgtttatgtattttgaggaaattgataatgagttagattacgaaccagaaagtgcaaatgaggtcgcaaaaaaactgccgtatcaaggacagttaaaactattactaggagaattattttttcttagtaagttacagcgacacggtatattagatggtgccaccgtagtgtatataggatcggctcctggtacacatatacgttatttgagagatcatttctataatttaggagtgatcatcaaatggatgctaattgacggccgccatcatgatcctattttaaatggattgcgtgatgtaactctagtgactcggttcgttgatgaggaatatctacgatccatcaaaaaacaactgcatccttctaagattattttaatttctgatgtaagatccaaacgaggaggaaatgaacctagtacggcggatttactaagtaattacgctctacaaaatgtcatgattagtattttaaaccccgtggcatctagtcttaaatggagatgcccgtttccagatcaatggatcaaggacttttatatcccacacggtaataaaatgttacaaccttttgctccttcatattcagctgaaatgagattattaagtatttataccggtgagaacatgagactgactcgagttaccaaattagacgctgtaaattatgaaaaaaagatgtactaccttaataagatcgtccgtaacaaagtagttgttaactttgattatcctaatcaggaatatgactattttcacatgtactttatgctgaggaccgtgtactgcaataaaacatttcctactactaaagcaaaggtactatttctacaacaatctatatttcgtttcttaaatattccaacaacatcaactgaaaaagttagtcatgaaccaatacaacgtaaaatatctagcaaaaattctatgtctaaaaacagaaatagcaagagatccgtacgcagtaataaatagaaacgtactactgagatatactaccgatatagagtataatgatttagttactttaataaccgttagacataaaattgattctatgaaaactgtgtttcaggtatttaacgaatcatccataaattatactccggttgatgatgattatggagaaccaatcattataacatcgtatcttcaaaaaggtcataacaagtttcctgtaaattttctatacatagatgtggtaatatctgacttatttcctagctttgttagactagatactacagaaactaatatagttaatagtgtactacaaacaggcgatggtaaaaagactcttcgtcttcccaaaatgttagagacggaaatagttgtcaagattctctatcgccctaatataccattaaaaattgttagatttttccgcaataacatggtaactggagtagagatagccgatagatctgttatttcagtcgctgattaatcaattagtagagatgagataagaacattataataatcaataatatatcttatatcttatatcttatatcttatatcttgtttagaaaaatgctaatattaaaatagctaacgctagtaatccaatcggaagccatttgatatctataatagggtatctaatttcctgatttaaatagcggacagctatattctcggtagctactcgtttggaatcacaaacattatttacatctaatttactatctgtaatggaaacgtttcccaatgaaatggtacaatccgatacattgcattttgttatatttttttttaaagaggctggtaacaacgcatcgcttcgtttacatggctcgtaccaacaataatagggtaatcttgtatctattcctatccgtactatgcttttatcaggataaatacatttacatcgtatatcgtctttgttagcatcacagaatgcataaatttgttcgtccgtcatgataaaaatttaaagtgtaaatataactattatttttatagttgtaataaaaagggaaatttgattgtatactttcggttctttaaaagaaactgacttgataaaaatggctgtaatctctaaggttacgtatagtctatatgatcaaaaagagattaatgctacagatattatcattagtcatgttaaaaatgacgacgatatcggtaccgttaaagatggtagactaggtgctatggatggggcattatgtaagacttgtgggaaaacggaattggaatgtttcggtcactggggtaaagtaagtatttataaaactcatatagttaagcctgaatttatttcagaaattattcgtttactgaatcatatatgtattcactgcggattattgcgttcacgagaaccgtattccgacgatattaacctaaaagagttatcgggacacgctcttaggagattaaaggataaaatattatccaagaaaaagtcatgttggaacagtgaatgtatgcaaccgtatcaaaaaattactttttcaaagaaaaaggtttgtttcgtcaacaagttggatgatattaacgttcctaattctctcatctatcaaaagttaatttctattcatgaaaagttttggccattattagaaattcatcaatatccagctaacttattttatacagactactttcccatccctccgttgattattagaccggctattagtttttggatagatagtatacccaaagagaccaatgaattaacttacttattaggtatgatcgttaagaattgtaacttgaatgctgatgaacaggttatccagaaggcggtaatagaatacgatgatattaaaattatttctaataacactaccagtatcaatttatcatatattacatccggcaaaaataatatgattagaagttatatcgtcgcccgacgaaaagatcagaccgctagatctgtaattggtcccagtacatctatcaccgttaatgaggtaggaatgcccgcatatattagaaatacacttacagaaaagatatttgttaatgcctttacagtggataaagttaaacaactattagcgtcaaaccaagttaaattttactttaataaacgattaaaccaattaacaagaatacgccaaggaaagtttattaaaaataaaatacatttattgcctggtgattgggtagaagtagctgttcaagaatatacaagtattatttttggaagacagccgtctctacatagatacaacgtcatcgcttcatctatcagagctaccgaaggagatactatcaaaatatctcccggaattgccaactctcaaaatgctgatttcgacggggatgaggaatggatgatattagaacaaaatcctaaagctgtaattgaacaaagtattcttatgtatccgacgacgttactcaaacacgatattcatggagcccccgtttatggatctattcaagatgaaatcgtagcagcgtattcattgtttaggatacaagatctttgtttagatgaagtattgaacatcttggggaaatatggaagagagttcgatcctaaaggtaaatgtaaattcagcggtaaagatatctatacttacttgataggtgaaaagattaattatccgggtctcttaaaggatggtgaaattattgcaaacgacgtagatagtaattttgttgtggctatgaggcatctgtcattggctggactcttatccgatcataagtcgaacgtggaaggtatcaactttattatcaagtcatcttatgtttttaagagatatctatctatttacggttttggggtgacattcaaagatctgagaccaaattcgacgttcactaataaattggaggccatcaacgtagaaaaaatagaacttatcaaagaagcatacgccaaatatctcaacgatgtaagagacgggaaaatagttccattatctaaagctttagaggcggactatgtggaatccatgttatccaacttgacaaatcttaatatccgagagatagaagaacatatgagacaaacgctgatagatgatccagataataacctcctgaaaatggccaaagcgggttataaagtaaatcccacagaactaatgtatattctaggtacgtatggacaacaaaggattgatggtgaaccagcagagactcgagtattgggtagagttttaccttactatcttccagactctaaggatccagaaggaagaggttatattcttaattctttaacaaaaggattaacgggttctcaatattacttttcgatgctggttgccagatctcaatctactgatatcgtctgtgaaacatcacgtaccggaacactggctagaaaaatcattaaaaagatggaggatatggtggtcgacggatacggacaagtagttataggtaatacgctcatcaagtacgccgccaattataccaaaattctaggctcagtatgtaaacctgtagatcttatctatccagatgagtccatgacttggtatttggaaattagtgctctgtggaataaaataaaacagggattcgtttactctcagaaacagaaacttgcaaagaagacattggcgccgtttaatttcctagtattcgtcaaacccaccactgaggataatgctattaaggttaaggatctgtacgatatgattcataacgtcattgatgatgtgagagagaaatacttctttacggtatctaatatagattttatggagtatatattcttgacgcatcttaatccttctagaattagaattacaaaagaaacggctatcactatctttgaaaagttctatgaaaaactcaattatactctaggtggtggaactcctattggaattatttctgcacaggtattgtctgagaagtttacacaacaagccctgtccagttttcacactactgaaaaaagtggtgccgtcaaacaaaaacttggtttcaacgagtttaataacttgactaatttgagtaagaataagaccgaaattatcactctggtatccgatgatatctctaaacttcaatctgttaagattaatttcgaatttgtatgtttgggagaattaaatccagacatcactcttcgaaaagaaacagataggtatgtagtagatataatagtcaatagattatacatcaagagagcagaaataaccgaattagtcgtcgaatatatgattgaacgatttatctcctttagcgtcattgtaaaggaatggggtatggaaacattcattgaggatgaggataatattagatttactgtctacctaaatttcgttgaaccggaagaattgaatcttagtaagtttatgatggttcttccgggtgccgccaacaagggaaagattagtaaattcaagattcctatctctgactatacgggttatgacgacttcaatcaaacaaaaaagctcaataagatgactgtagaactcatgaatctaaaagaattgggttctttcgatttggaaaacgtcaacgtgtatcctggagtatggaatacatacgatatcttcggtatcgaggccgctcgtgaatacttgtgcgaagccatgttaaacacctatggagaagggttcgattatctgtatcagccttgtgatcttctcgctagtttactatgtgctagttacgaaccagaatcagtgaataaattcaagttcggcgcagctagtactcttaagagagctacgttcggagacaataaagcattgttaaacgcggctcttcataaaaagtcagaacctattaacgataatagtagctgccacttttttagcaaggtccctaatataggaactggatattacaaatactttatcgacttgggtcttctcatgagaatggaaaggaaactatctgataagatatcttctcaaaagatcaaggaaatggaagaaacagaagacttttaattcttatcaataacatatttttctatgatctgtcttttaaacgatggattttccacaaatgcgcctctcaagtccctcatagaatgatacacgtataaaaaatatagcataggcgatgactccttatttttagacattagatatgccaaaatcatagccccgcttctatttactcccgcagcacaatgaaccaacacgggctcgtttcgttgatcacatttagataaaaaggcggttacgtcgtcaaaatatttactaatatcggtagttgtatcatctaccaacggtatatgaataatattaatattagagttaggtaatgtatatttatccatcgtcaaatttaaaacatatttgaacttaacttcagatgatggtgcatccatagcatttttataatttcccaaatacacattattggttacccttgtcattatagtgggagatttggctttgtgcatatctccagttgaacgtagtagtaagtatttatacaaacttttcttatccatttataacgtacaaatggataaaactactttatcggtaaacgcgtgtaatttagaatacgttagagaaaaggctatagtaggcgtacaagcagccaaaacatcaacacttatattctttgttattatattggcaattagtgcgctattactctggtttcagacgtctgataatccagtctttaatgaattaacgagatatatgcgaattaaaaatacggttaacgattggaaatcattaacggatagcaaaacaaaattagaaagtgatagaggtagacttctagccgctggtaaggatgatatattcgacttcaaatgtgtggatttcggcgcctattttatagctatgcgattggataagaaaacatatctgccgcaagctattaggcgaggtactggagacgcgtggatggttaaaaaggcggcaaaggtcgatccatctgctcaacaattttgtcagtatttgataaaacacaagtctaataatgttattacttgtggtaatgagatgttaaatgaattaggttatagcggttattttatgtcaccgcattggtgttccgattttagtaatatggaatagtgttagataaatgcggtaacgaatgttcctgtaaggaaccataacagcttagatttaacgttaaagatgagcataaacataataaacaaaattacaatcaaacttataacattaatatcaaacaatccaaaaaatgaaatcagtggagtagtaaacgcgtacataactcctggataacgtttagcagctgccgttcctattctagaccaaaaatttggtttcatgttttcgaaacggtattctgcaacaagtcggggatcgtgttctacatatttggcggcattatccagtatctgcctattgatcttcatttcgttttcgattctggctatttcaaaataaaatcccgatgatagacctccagactttataatttcatctacgatgttcagcgccgtagtaactctaataatataggctgataagctaacatcataccctcctgtatatgtgaatatggcatgatttttgtccattacaagctcggttttaactttattgcctgtaataatttctctcatctgtaggatatctatttttttgtcatgcattgccttcaagacgggacgaagaaacgtaatatcctcaataacgttatcgttttctacaataactacatattctacctttttattttctaactcggtaaaaaaattagaatcccatagggctaaatgtctagcgatatttcttttcgtttcttctgtacacatagtgttacaaaaccctgaaaagaagtgagtatacttgtcatcatttctaatgtttcctccagtccactgtataaacgcataatccttgtaatgatctggatcatccttgactaccacaacatttcttttttctggcataacttcgttgtcctttacatcatcgaacttctgatcattaatatgctcatgaacattaggaaatgtttctgatggaggtctatcaataactggcacaacaataacaggagttttcaccgccgccatttagttattgaaattaatcatatacaactctttaatacgagttatattttcgtctatccattgtttcacattgacatatttcgacaaaaagatataaaatgcgtattccaatgcttctctgtttaatgaattactaaaatatacaaacacgtcactgtctggcaataaatgatatcttagaatattgtaacaatttattttgtattgcacatgttcgtgatctatgagttcttcttcgaatggcataggatctccgaatctgaaaacgtataaataggagttagaataataatatttgagagtattggtaatatataaactctttagcggtataattagtttttttctctcaatttctatttttagatgtgatggaaaaatgactaattttgtagcattagtatcatgaactctaatcaaaatcttaatatcttcgtcacacgttagctctttgaagtttttaagagatgcatcagttggttctacagatggagtaggtgcaacaattttttgttctacacatgtatgtactggagccattgttttaactataatggtgcttgtatcgaaaaactttaatgcagatagcggaagctcttcgccgcgactttctacgtcgtaattgggttctaacgccgatctctgaatggatactagttttctaagttctaatgtgattctctgaaaatgtaaatccaattcctccggcattatagatgtgtatacatcggtaaataaaactatagtatccaacgatcccttctcgcaaattctagtcttaaccaaaaaatcgtatataaccacggagatggcgtatttaagagtggattcttctaccgttttgttcttggatgtcatataggaaactataaagtccgcactactgttaagaatgattactaacgcaactatatagtttaaattaagcattttggaaacataaaataactctgtagacgatacttgactttcgaataagtttgcagacaaacgaagaaagaacagacctctcttaatttcagaagaaaactttttttcgtattcctgacgtctagagtttatatcaataagaaagttaagaattagtcggttaatgttgtatttcattacccaagtttgagatttcataatattatcaaaagacatgataatattaaagataaagcgctgactatgaacgaaatagctatatggttcgctcaagaatatagtcttgttaaacgtggaaacgataactgtatttttaatcacgtcagcggcatctaaattaaatataggtatatttattccacacactctacaatatgccacaccatcttcataataaataaattcgttagcaaaattattaattttagtgaaatagttagcgtcaactttcatagcttccttcaatctaatttgatgctcacacggtgcgaattccactctaacatcccttttccatgcctcaggttcatcgatctctataatatctagttttttgcgtttcacaaacacaggctcgtctctcgcgatgagatctgtatagtaactatgtaaatgataactagatagaaagatgtagctatatagatgacgatcctttaagagaggtataataactttaccccaatcagatagactgttgttatggtcttcggaaaaagaatttttataaatttttccagtattttccaaatatacgtacttaacatctaaaaaatccttaatgataataggaatggataatccgtctattttataaagaaatacatatcgcacattatacttttttttggaaatgggaataccgatgtgtctacataaatatgcaaagtctaaatattttttagagaatcttagttggtccaaattcttttccaagtacggtaatagatttttcatattgaacggtatcttcttaatctctggttctagttccgcattaaatgatgaaactaagtcactatttttataactaacgattacatcacctctaacatcatcatttaccagaatactgatcttcttttgtcgtaaatacatgtctaatgtgttaaaaaaaagatcatacaagttatacgtcatttcatctgtggtattcttgtcattgaaggataaactcgtactaatctcttctttaacagcctgttcaaatttatatcctatatacgaaaaaatagcaaccagtgtttgatcatccgcgtcaatattctgttctatcgtagtgtataacaatcgtatatcttcttctgtgatagtcgatacgttataaaggttgataacgaaaatatttttatttcgtgaaataaagtcatcgtaggattttggacttatattcgcgtctagtagatatgcttttatttttggaatgatctcaattagaatagtctctttagagtccatttaaagttacaaacaactaggaaattggtttatgatgtataatttttttagtttttatagattctttattctatacttaaaaaatgaaaataaatacaaaggttcttgagggttgtgttaaattgaaagcgagaaataatcataaattatttcattatcgcgatatccgttaagtttgtatcgtaatggcgtggtcaattacgaataaagcggatactagtagcttcacaaagatggctgaaatcagagctcatctaaaaaatagcgctgaaaataaagataaaaacgaggatattttcccggaagatgtaataattccatctactaagcccaaaaccaaacgagccactactcctcgtaaaccagcggctactaaaagatcaaccaaaaaggaggaagtggaagaagaagtagttatagaggaatatcatcaaacaactgaaaaaaattctccatctcctggagtcagcgacattgtagaaagcgtggctgctgtagagctcgatgatagcgacggggatgatgaacctatggtacaagttgaagctggtaaagtaaatcatagtgctagaagcgatctttctgacctaaaggtggctaccgacaatatcgttaaagatcttaagaaaattattactagaatctctgcagtatcgacggttctagaggatgttcaagcagctggtatctctagacaatttacttctatgactaaagctattacaacactatctgatctagtcaccgagggaaaatctaaagttgttcgtaaaaaagttaaaacttgtaagaagtaaatgcgtgcacttttttataaagatggtaaactctttaccgataataattttttaaatcctgtatcagacgataatccagcgtatgaggttttgcaacatgttaaaattcctactcatttaacagatgtagtagtatatgaacaaacgtgggaggaggcgttaactagattaatttttgtgggaagcgattcaaaaggacgtagacaatacttttacggaaaaatgcatgtacagaatcgcaacgctaaaagagatcgtatttttgttagagtatataacgttatgaaacgaattaattgttttataaacaaaaatataaagaaatcgtccacagattccaattatcagttggcggtttttatgttaatggaaactatgttttttattagatttggtaaaatgaaatatcttaaggagaatgaaacagtagggttattaacactaaaaaataaacacatagaaataagtcccgatgaaatagttatcaagtttgtaggaaaggacaaagtttcacatgaatttgttgttcataagtctaatagactatataaaccgctattgaaactgacggatgattctagtcccgaagaatttctgttcaacaaactaagtgaacgaaaggtatacgaatgtatcaaacagtttggtattagaatcaaggatctccgaacgtatggagtcaattatacgtttttatataatttttggacaaatgtaaagtccatatctcctcttccgtcaccaaaaaagttaatagcgttaactatcaaacaaactgctgaagtggtaggtcatactccatcaatttcaaaaagagcttatatggcaacgactattttagaaatggtaaaggataaaaattttttagatgtagtatctaaaactacgttcgatgaattcctatctatagtcgtagatcacgttaaatcatctacggatggatgatatagatctttacacaaataattacaagaccgataaatggaaatggataagcgtatgaaatctctcgcaatgacagctttcttcggagagctaagcacattagatattatggcattgataatgtctatatttaaacgccatccaaacaataccattttttcagtggataaggatggtcagtttatgattgatttcgaatacgataattataaggcttctcaatatttggatctgaccctcactccgatatctggagatgaatgcaagactcacgcatcgagtatagccgaacaattggcgtgtgtggatattattaaagaggatattagcgaatatatcaaaactactccccgtcttaaacgatttataaaaaaataccgcaatagatcagatactcgcatcagtcgagatacagaaaagcttaaaatagctctagctaaaggcatagattacgaatatataaaagacgcttgttaataagtaaatgaaaaaaaactagtcgtttataataaaacacgatatggatgccaacgtagtatcatcttctactattgcgacgtatatagacgctttagcgaagaatgcttcagaattagaacagaggtctaccgcatacgaaataaataatgaattggaactagtatttattaagccgccattgattactttgacaaatgtagtgaatatctctacgattcaggaatcgtttattcgatttaccgttactaataaggaaggtgttaaaattagaactaagattccattatctaaggtacatggtctagatgtaaaaaatgtacagttagtagatgctatagataacatagtttgggaaaagaaatcattagtgacggaaaatcgtcttcacaaagaatgcttgttgagactatcgacagaggaacgtcatatatttttggattacaagaaatatggatcctctatccgactagaattagtcaatcttattcaagcaaaaacaaaaaactttacgatagactttaagctaaaatattttctaggatccggtgcccaatctaaaagttctttgttgcacgctattaatcatccaaagtcaaggcctaatacatctctggaaatagaattcacacctagagacaatgaaacagttccatatgatgaactaataaaggaattgacgactctctcgcgtcatatatttatggcttctccagagaatgtaattctttctccgcctattaacgcgcctataaaaacctttatgttgcctaaacaagatatagtaggtttggatctggaaaatctatatgccgtaactaagactgacggcattcctataactatcagagttacatcaaacgggttgtattgttattttacacatcttggttatattattagatatcctgttaagagaataatagattccgaagtagtagtctttggtgaggcagttaaggataagaactggaccgtatatctcattaagctaatagagcccgtgaatgcaatcagtgatagactagaagaaagtaagtatgttgaatctaaactagtggatatttgtgatcggatagtattcaagtcaaagaaatacgaaggtccgtttactacaactagtgaagtcgtcgatatgttatctacatatttaccaaagcaaccagaaggtgttattctgttctattcaaagggacctaaatctaacattgattttaaaattaaaaaggaaaatactatagaccaaactgcaaatgtagtatttaggtacatgtccagtgaaccaattatctttggagaatcgtctatctttgtagagtataagaaatttagcaacgataaaggctttcctaaagaatatggttctggtaagattgtgttatataacggcgttaattatctaaataatatctattgtttggaatatattaatacacataatgaagtgggtattaagtccgtggttgtacctattaagtttatagcagaattcttagttaatggagaaatacttaaacctagaattgataaaaccatgaaatatattaactcagaagattattatggaaatcaacataatatcatagtcgaacatttaagagatcaaagcatcaaaataggagatatctttaacgaggataaactatcggatgtgggacatcaatacgccaataatgataaatttagattaaatccagaagttagttattttacgaataaacgaactagaggaccgttgggaattttatcaaactacgtcaagactcttcttatttctatgtattgttccaaaacatttttagacgattccaacaaacgaaaggtattggcgattgattttggaaacggtgctgacctggaaaaatacttttatggagagattgcgttattggtagcgacggatccggatgctgatgctatagctagaggaaatgaaagatacaacaaattaaactctggaattaaaaccaagtactacaaatttgactacattcaggaaactattcgatccgatacatttgtctctagtgtcagagaagtattctattttggaaagtttaatatcatcgactggcagtttgctatccattattcttttcatccgagacattatgctaccgtcatgaataacttatccgaactaactgcttctggaggcaaggtattaatcactaccatggacggagacaaattatcaaaattaacagataaaaagacttttataattcataagaatttacctagtagcgaaaactatatgtctgtagaaaaaatagctgatgatagaatagtggtatataatccatcaacaatgtctactccaatgactgaatacattatcaaaaagaacgatatagtcagagtgtttaacgaatacggatttgttcttgtagataacgttgatttcgctacaattatagaacgaagtaaaaagtttattaatggcgcatctacaatggaagatagaccgtctacaaaaaactttttcgaactaaatagaggagccattaaatgtgaaggtttagatgtcgaagacttacttagttactatgttgtttatgtcttttctaagcggtaaataataatatggtatgggttctgatatccccgttctaaatgcattaaataattccaatagagcgatttttgttcctataggaccttccaactgtggatactctgtattgttaatagatatattaatacttttgtcgggtaacagaggttctacgtcttctaaaaataaaagttttataacatctggcctgttcataaataaaaacttggcgattctatatatactcttattatcaaatctagccattgtcttatagatgtgagctactgtaggtgtaccatttgattttctttctaatactatatatttctctcgaagaagttcttgcacatcatctgggaataaaatactactgttgagtaaatcagttattttttttatatcgatattgatggacatttttatagttaaggataataagtatcccaaagtcgataacgacgataacgaagtatttatacttttaggaaatcacaatgactttatcagattaaaattaacaaaattaaaggagcatgtatttttttctgaatatattgtgactccagatacatatggatctttatgcgtcgaattaaatgggtctagttttcagcacggtggtagatatataaaggtggaggaatttatagatgctggaagacaagttagatggtgttctacatccaatcatatatctaaagatatacccgaagatatgcacactgataaatttgtcatttatgatatatacacttttgacgctttcaagaataaacgattggtattcgtacaggtacctccgtcgttaggagatgatagtcatttgactaatccgttattgtctccgtattatcgtaattcagtagccagacaaatggtcaataatatgatttttaatcaagattcatttttaaaatatttattagaacatctgattagaagccactatagagtttctaaacatataacaatagttagatacaaggataccgaagaattaaatctaacgagaatatgttataatagagataagtttaaggcgtttgtattcgcttggtttaacggcgtttcggaaaatgaaaaggtactagatacgtataaaaaggtatctaatttgatataatgaattcagtgactgtatcacacgcgccatatactattacttatcacgatgattgggaaccagtaatgagtcaattggtagagttttataacgaagtagccagttggctgctacgagacgagacgtcgcctattcctgataagttctttatacagttgaaacaaccgcttagaaataaacgagtatgtgtgtgcggtatagatccgtatccgaaagatggaactggtgtaccgttcgaatcaccaaattttacaaaaaaatcaattaaggagatagcttcatctatatctagattaaccggagtaattgattataaaggttataaccttaatataatagacggggttataccctggaattattacttaagttgtaaattaggagaaacaaaaagtcacgcgatctactgggataagatttccaagttactgctgcagcatataactaaacacgttagtgttctttattgtttgggtaaaacagatttctcgaatatacgggcaaagttagaatccccggtaactaccatagtcggatatcatccagcggctagagaccgccaattcgagaaagatagatcatttgaaattatcaacgttttactggaattagacaacaaggcacctataaattgggctcaagggtttatttattaatgctttagtgaaattttaacttgtgttctaaatggatgcggctattagaggtaatgatgttatctttgttcttaagactataggtgtcccgtcagcgtgcagacaaaatgaagatccaagatttgtagaagcatttaaatgcgacgagttagaaagatatattgagaataatccagaatgtacactattcgaaagtcttagggatgaggaagcatactctatagtcagaattttcatggatgtagatttagacgcgtgtctagacgaaatagattatttaacggctattcaagattttattatcgaggtgtcaaactgtgtagctagattcgcgtttacagaatgcggtgccattcatgaaaatgtaataaaatccatgagatctaatttttcattgactaagtctacaaatagagataaaacaagttttcatattatctttttagacacgtataccactatggatacattgatagctatgaaacgaacactattagaattaagtagatcatctgaaaatccactaacaagatcgatagacactgccgtatataggagaaaaacaactcttcgggttgtaggtactaggaaaaatccaaattgcgacactattcatgtaatgcaaccaccgcatgataatatagaagattacctattcacttacgtggatatgaacaacaatagttattacttttctctacaacaacgattggaggatttagttcctgataagttatgggaaccagggtttatttcattcgaagacgctataaaaagagtttcaaaaatattcattaattctataataaactttaatgatctcgatgaaaataattttacaacggtaccactggtcatagattacgtaacaccttgtgcattatgtaaaaaacgatcgcataaacatccgcatcaactatcgttggaaaatggtgctattagaatttacaaaactggtaatccacatagttgtaaagttaaaattgttccgttggatggtaataaactgtttaatattgcacaaagaattttagacactaactctgttttattaaccgaacgaggagaccatatagtttggattaataattcatggaaatttaacagcgaagaacccttgataacaaaactaattttgtcaataagacatcaactacctaaggaatattcaagcgaattactctgtccgaggaaacgaaagactgtagaagctaacatacgagacatgttagtagattcagtggagaccgatacctatccggataaacttccgtttaaaaatggtgtattggacctggtagacggaatgttttactctggagatgatgctaaaaaatatacgtgtactgtatcaaccggatttaaatttgacgatacaaagttcgtcgaagacagtccagaaatggaagagttaatgaatatcattaacgatatccaaccattaacggatgaaaataagaaaaatagagagctatatgaaaaaacattatctagttgtttatgcggtgctaccaaaggatgtttaacattcttttttggagaaactgcaactggaaagtcgacaaccaaacgtttgttaaagtctgctatcggtgacctgtttgttgagacgggtcaaacaattttaacagatgtattggataaaggacctaatccatttatcgctaacatgcatttgaaaagatctgtattctgtagcgaactacctgattttgcctgtagtggatcaaagaaaattagatctgacaatattaaaaagttgacagaaccttgtgtcattggaagaccgtgtttctccaataaaattaataatagaaaccatgcgacaatcattatcgatactaattacaaacctgtttttgataggatagataacgcattaatgagaagaattgccgtcgtgcgattcagaacacacttttctcaaccttctggtagagaggctgctgaaaataatgacgcgtacgataaagtcaaactattagacgaggggttagatggtaaaatacaaaataatagatatagattcgcatttctatacttgttggtgaaatggtacagaaaatatcatgttcctattatgaaactatatcctacacccgaagagattcctgactttgcattctatctcaaaataggtactctgttagtatctagctctgtaaagcatattccattaatgacggacctctccaaaaagggatatatattgtacgataatgtggttactcttccgttgactactttccaacagaaaatatccaagtattttaattctagactatttggacacgatatagagagcttcatcaatagacataagaaatttgccaatgttagtgatgaatatctgcaatatatattcatagaggatatttcatctccgtaaatatatgctcatatatttatagaagatatcacatatctaaatgaataccggaatcatagatttatttgataatcatgttgatagtataccaactatattacctcatcagttagctactctagattatctagttagaactatcatagatgagaacagaagcgtgttattgttccatattatgggatcaggtaaaacaataatcgctttgttgttcgccttggtagcttccagatttaaaaaggtttacattctagtgccgaacatcaacatcttaaaaattttcaattataatatgggtgtagctatgaacttgtttaatgacgaattcatagctgagaatatctttattcattccacaacaagtttttattctcttaattataacgataacgtcattaattataacggattatctcgctacaataactctatttttatcgttgatgaggcacataatatctttgggaataatactggagaacttatgaccgtgataaaaaataaaaacaagattccttttttactattgtctggatctcccattactaacacacctaatactctgggtcatattatagatttaatgtccgaagagacgatagattttggtgaaattattagtcgtggtaagaaagtaattcagacacttcttaacgaacgaggtgtgaatgtacttaaggatttgcttaaaggaagaatatcatattacgaaatgcctgataaagatctaccaacgataagatatcacggacgtaagtttctagatactagagtagtatattgtcacatgtctaaacttcaagagagagattatatgattactagacgacagctatgttatcatgaaatgtttgataaaaatatgtataacgtgtcaatggcagtattgggacaacttaatctgatgaataatttagatactttatttcaggaacaggataaggaattgtacccaaatctgaaaataaataatggcgtgttatacggagaagaattggtaacgttaaacattagttccaaatttaaatactttattaatcggatacagacactcaacggaaaacattttatatacttttctaattctacatatggcggattggtaattaaatatatcatgctcagtaatggatattctgaatataatggttctcagggaactaatccacatatgataaacggcaaaccaaaaacatttgctatcgttactagtaaaatgaaatcgtctttagaggatctattagatgtgtataattctcctgaaaacgatgatggtagtcaattgatgtttttgttttcatcaaacattatgtccgaatcctatactctgaaagaggtaaggcatatttggtttatgactatcccagatactttttctcaatacaaccaaattcttggacgatctattagaaaattctcttacgccgatatttctgaaccagttaatgtatatcttttagccgccgtatattccgatttcaatgacgaagtgacgtcattaaacgattacacacaggatgaattaattaatgttttaccatttgacatcaaaaagctgttatatctaaaatttaagacgaaagaaacgaatagaatatactctattcttcaagagatgtctgaaacgtattctcttccaccacatccatcaattgtaaaagttttattgggagaattggtcagacaatttttttataataattctcgtattaagtataacgataccaagttacttaaaatggttacatcagttataaaaaataaagaagacgctaggaattacatagatgatattgtaaacggtcacttctttgtatcgaataaagtatttgataaatctcttttatacaaatacgaaaacgatattattacagtaccgtttagactttcctacgaaccatttgtttggggagttaactttcgtaaagaatataacgtggtatcttctccataaaactgatgagatatataaagaaataaatgtcgagctttgttaccaatggatacctttccgttacattggaaccacacgagctgacgttagacataaaaactaatattaggaatgccgtatataagacgtatctccatagagaaattagtggtaaaatggccaagaaaatagaaattcgtgaagacgtggaattacctctcggcgaaatagttaataattctgtagttataaacgttccgtgtgtaataacctacgcgtattatcacgttggggatatagtcagaggaacattaaacatcgaagatgaatcaaatgtaactattcaatgtggagatttaatctgtaaactaagtagagattcgggtactgtatcatttagcgattcaaagtactgcttttttcgaaatggtaatgcgtatgacaatggcagcgaagtcactgccgttctaatggaggctcaacaaggtatcgaatctagttttgtttttctcgcgaatatcgtcgactcataaaaaagagaatagcggtaagtataaacacgaatactatggcaataattgcgaatgttttattctcttcgatatatttttgataatatgaaaaacatgtctctctcaaatcggacaaccatctcataaaatagttctcgcgcgctggagaggtagttgccgctcgtataatctctccagaataatatacttgcgtgtcgtcgttcaatttatacggatttctatagttctctgttatataatgcggtttgccctcatgattagacgacgacaatagtgttctaaatttagatagttgatcagaatgaatgtttattggcgttggaaaaattatccatacagcgtctgcagagtggttgatagttgttcctagatatgtaaaataatccaacttactaggcagcaaattgtctagataaaatactgaatcaaacggtgcagacgtattggcggatctaatggaatccaattgattaactatcttttgaaaatatacatttttatgatccaatacttgtaagaatatagaaataatgataagtccatcatcgtgtttttttgcctcttcataagaactatattttttcttattccaatgaacaagattaatctctccagagtatttgtacacatctatcaagtgattggatccataatcgtcttcctttccccaatatatatgtagtgatgataacacatattcattggggagaaaccctccacttatatatcctcctttaaaattaatccttactagttttccagtgttctggatagtggttggtttcgactcattataatgtatgtctaacggcttcaatcgcgcgttagaaattgcttttttagtttctatattaataggagatagttgttgcggcatagtaaaaatgaaatgataactgtttaaaaatagctcttagtatgggaattacaatggatgaggaagtgatatttgaaactcctagagaattaatatctattaaacgaataaaagatattccaagatcaaaagacacgcatgtgtttgctgcgtgtataacaagtgacggatatccgttaataggagctagaagaacttcattcgcgttccaggcgatattatctcaacaaaattcagattctatctttagagtatccactaaactattacggtttatgtactacaatgaactaagagaaatctttagacggttgagaaaaggttctatcaacaatatcgatcctcactttgaagagttaatattattgggtggtaaactagataaaaaggaatctattaaagattgtttaagaagagaattaaaagaggaaagtgatgaacgtataacagtaaaagaatttggaaatgtaattctaaaacttacaacacgggataaattatttaataaagtatatataagttattgcatggcgtgttttattaatcaatcgttggaggatttatcgcatactagtatttacaatgtagaaattagaaagattaaatcattaaatgattgtattaacgacgataaatacgaatatctgtcttatatttataatatgctagttaatagtaaatgaacttttacagatctagtataattagtcagattattaagtataatagacgactagctaagtctattatttgcgaggatgactctcaaattattacactcacggcattcgttaaccaatgcctatggtgtcataaacgagtatccgtgtccgctattttattaactactgataacaaaatattagtatgtaacagacgagatagttttctctattctgaaataattagaactagaaacatgtttagaaaaaaacgattatttctgaattattccaattatttgaacaaacaggaaagaagtatactatcgtcatttttttctctagatccagctactactgataatgatagaatagacgctatttatccgggtggcatacccaaaaggggtgagaatgttccagagtgtttatccagggaaattaaagaagaagttaatatagacaattcttttgtattcatagacactcggttttttattcatggcatcatagaagataccattattaataaattttttgaggtaatcttctttgtcggaagaatatctctaacgagtgatcaaatcattgatacatttaaaagtaatcatgaaatcaaggatctaatatttttagatccgaattcaggtaatggactccaatacgaaattgcaaaatatgctctagatactgcaaaacttaaatgttacggccatagaggatgttattatgaatcattaaaaaaattaactgaggatgattgattaaaaaatataaattaatttaccatcgtgtatttttataacgggattgtccggcatatcatgtagatagttaccgtctacatcgtatactcgaccatctacgcctttaaatcctctatttattgacattaatctattagaattggaataccaaatattagtaccctcaattagtttattggtaatattttttttagacgatagatcgatggctcttgaaaccaaggttttccaaccggactcattgtcgatcggtgagaagtctttttcattagcatgaatccattctaatgatgtatgtttaaacactctaaacaattggacaaattcttttgatttgctttgaatgatttcaaataggtcttcgtctacagtaggcataccattagataatctagccattataaagtgcacgtttacatatctacgttctggaggagtaagaacgtgactattgagacgaatggctcttcctactatctgacgaagagacgcctcgttccatgtcatatctaaaatgaagatatcattaattgagaaaaaactaataccctcgcctccactagaagagaatacgcatgttttaatgcattctccgttagtgtttgattcttggttaaactcagccaccgccttgattctagtatcttttgttctagatgagaactctatattagagataccaaagactttgaaatatagtaataagatttctattcctgactgattaacaaatggttcaaagactagacatttaccatgggatgctaatattcccaaacatacatctataaatttgacgcttttctcttttaattcagtaaatagagagatatcagccgcactagcatcccctttcaatagttctccctttttaaaggtatctaatgcggatttagaaaactctctatctcttaatgaatttttaaaatcattatatagtgttgctatctcttgcgcgtattcgcccggatcacgattttgtctttcaggaaagctatcgaacgtaaacgtagtagccatacgtctcagaattctaaatgatgatatacctgtttttatttcagcgagtttagccttttgataaatttcttcttgctttttcgacatattaacgtatcgcattaatactgttttcttagcgaatgatgcagacccttctacgtcatcaaaaatagaaaactcgttattaactatatacgaacatagtcctcctagtttggagactaattctttttcatcgactagacgtttattctcaaatagtgattggtgttgtaaggatcctggtcgtagtaagttaaccaacatggtgaattcttgcacactattgacgataggtgtagccgataaacaaatcatcttatggttttttaacgcaatggtcttagataaaaaattatatactgaacgagtaggacggatcttaccatcttctttgattaatgatttagaaatgaagttatgacattcatcaatgatgacgcatattctactcttggaattaatagttttgatattagtaaaaaatttatttctaaaattttgatcatcgtaattaataaaaatacaatccttcgttatctctggagcgtatctgagtatagtgttcatccaaggatcttctatcaaagcctttttcaccaataagataatagcccaattcgtataaatatccttaagatgtttgagaatatatacagtagtcattgttttaccgacacccgtttcatggaacaataaaagagaatgcatactgtctaatcctaagaaaactcttgctacaaaatgttgataatccttgaggcgtactacgtccgaccccatcatttcaacaggcatattagtagttctgcgcaatgcataatcgatataggccgcgtgtgatttactcatttatgagtgataagtaataactatgttttaaaaatcacagcagtagtttaactagtcttctctgatgtttgttttcgatactttttgaatcagaagtcatactagaataaagcaacgagtgaacgtaatagagagcttcgtatactctattcgaaaactctaagaacttattaatgaattccgtatccactggattgtttaaaatactaaattgaacactgttcacatccttccaagaagaagacttagtgacggacttaacatgagacataaataaatccaaattttttttacaaacatcactagccaccataatggcgctatctttcaaccagctatcgcttacgcattttagcagtctaacatttttaaagagactacaatatattctcatagtatcgattacacctctaccgaataaagttggaagtttaataatacaatatttttcgtttacaaaatcaaataatggtcgaaacacgtcgaaggttaacatcttataatcgctaatgtatagattgttttcagtgagatgattattagatttaatagcatctcgttcacgtttgaacagtttattgcgtgcgctgaggtcggcaactacggcgtccgctttagtactcctcccataatactttacgctattaatctttaaaatttcatagactttatctagatcgctttctggtaacatgatatcatgtgtaaaaagttttaacatgtcggtcggcattctatttagatcattaactctagaaatctgaagaaagtaattagctccgtattccagactaggtaatgggcttttacctagagacagattaagttctggcaatgtttcataaaatggaagaaggacatgcgttccctcccggatattttttacaatttcatccatttacaactctatagtttgttttcattattattagttattatctcccataatcttggtaatacttaccccttgatcgtaagataccttatacaggtcattacatacaactaccaattgtttttgtacataatagattggatggttgacatccatggtggaataaactactcgaacagatagtttatctttccccctagatacattagccgtaatagttgtcggcctaaagaatatctttggtgtaaagttaaaagttagggttcttgttccattattgctttttgtcagtagttcattataaattctcgagatgggtccgttctctgaatatagaacatcatttccaaatctaacttctagtctagaaataatatcggtcttattcttaaaatctattcccttgatgaagggatcgttaatgaacaaatccttggcctttgattcggctgatctattatctccgttatagacgttacgttgactagtccaaagacttacaggaatagatgtatcgatgatgttgatactatgtgatatgtgagcaaagattgttctcttagtggcatcactatatgttccagtaatggcggaaaactttttagaaatgttatatataaaagaattttttcgtgttccaaacattagcagattagtatgaagataaacactcatattatcaggaacattatcaatttttacatacacatcagcatcttgaatagaaacgataccatcttctggaacctctacgatctcagcagactccggataaccagtcggtggaccatcgctaacaataactagatcatccaacaatctactcacatatgcatctatataatctttttcatcttgtgagtaccctggatacgaaataaatttattatccgtatttccataataaggtttagtataaacagagagagatgttgccgcatgaacttcagttacagtcgccgttggttggtttatttgacctattactctcctaggtttctctataaacgatggtttaatttgtacattcttaaccatatatccaataaagctcaattcaggaacataaacaaattctttgttgaacgtttcaaagtcgaacgaagagtcacgaataacgatatcggatactggattgaaggttaccgttacggtaatttttgaatcggatagtttaagactgctgaatgtatcttccacatcaaacggagttttaatataaacgtatactgtagatggttctttaatagtgtcattaggagttaggccaatagaaatatcattaagttcactagaatatccagagtgtttcaaagcaattgtattattgatacaattattatataattcttcgccctcaatttcccaaataacaccgttacacgaagagatagatacgtgattaatacatttatatccaacatatggtacgtaactgaatcttcccatacctttaacttctggaagttccaaactcagaaccaaatgattaagcgcagtaatatactgatccctaatttcgaagctagcgatagcctgattgtctggaccatcgtttgtcataactccggatagagaaatatattgcggcatatataaagttggaatttgactatcgactgcgaagacattagaccgtttaatagagtcatccccaccgatcaaagaattaatgatagtattattcattttctatttaaaatggaaaaagcttacaataaactccgtagagaaatatctataatttgtgagttttccttaaagtaacagcttccgtaaacgccgtctttatctcttagtaagtttattgtatttatgaccttttccttatcttcatagaatactaaaggcaacaaagaaatttttggttcttctctaagagctacgtgagacttaaccatagaagccaacgaatccctacatattttagaacagaaataccctacttcaccacccttgtatgtctcaatactaataggtctaaaaaccaaatcttgattacaaaaccaacacttatcaattacactatttgtcttaatagacacatctgccatagatttataatactttggtagtatacaagcgagtgcttcttctttagcgggcttaaagactgctttaggtgctgaaataaccacatctggaaggcttactcgcttagccatttaattacggaactatttttttatacttctaatgagcaagtagaaaacctctcatctacaaaaacgtactcgtgtccataatcctctaccatagttacacgttttttagatctcatatgtgctaaaaagttttcccatactaattggttactattatttttcgtataatttttaacagtttgaggttttagatttttagttacagaagtgatatcgaatattttatccaaaaagaatgaataattaattgtcttagaaggagtgttttcttggcaaaagaataccaagtgcttaaatatttctactacttcattaatcttttctgtactcagattcagtttctcatcttttacttgattgattatttcaaagactaacttataatcctttttatttattctctcgttagccttaagaaaactagatacaaaatttgcatctacatcatccgtggatatttgatttttttccatgatatccaagagttccgagataatttctccagaacattgatgagacaataatctccgcaatacatttctcaaatgaataagtttattagacacgtggaagtttgactttttttgtacctttgtacatttttgaaataccgactcgcaaaaaatacaatattcatatccttgttcagatactataccgttatgtctacaaccgctacataatcgtagattcatgttaacactctacgtatctcgtcgtccaatattttatataaaaacattttatttctagacgttgccagaaaatcctgtaatatttttagttttttgggctgtgaataaagtatcgccctaatattgttaccgtcttccgccaatatagtagttaaattatccgcacatgcagaagaacaccgcttaggcggattcagtacaatgttatatttttcgtaccaactcatttaaatatcataatctaaaatagttctgtaatatgtctagcgctaatatattgatcataatcctgtgcataaattaagatacaacaatgtctcgaaatcatcgacatggcttcttccatagttagaagatcgtcgtcaaagttagcaacgtgattcatcaacatttgctgttttgaggcagcaaatactgaaccgtcgccattcaaccattcataaaaaccatcgtctgaatccattgataatttcttgtactggtttttgagagctcgcatcaatctagcatttctagctcccggattgaaaacagaaagaggatcgtacatccagggtccattttctgtaaatagaatcgtataatgtcccttcaagaaaatatcagacgatccacaatcaaagaattggtctccgagtttgtaacagacagcggactttaacctatacatgataccgtttagcataatttctggtgatacgtcaatcggagtatcatctattagagatctaaagccggtgtaacattctccaccaaacatattcttattctgacgtcgttctacataaaacatcattgctccattaacgataacaggggaatgaacagcactacccatcacattagttcccaatggatcaatgtgtgtaactccagaacatcttccatagcctatgttaggaggagcgaacaccactcttccactattgccatcgaatgccatagaataaatatccttggaattgatagaaatcggactgtcggatgttgtgatcatcttcataggattaacaactatgtatggtgccgcctgaagtttcatatcgtaactgatgccgtttataggtctagccacagaaaccaacgtaggtctaaatccaactatagacaaaatagaagccaatatctgttcctcatctgtcataacttgagagcatccagtatgaataatcttcattagatggggatctaccgcatcatcatcgttacaataaaaaattcccattctaatgttcataattgcttttctaatcatggtatgcatgtttgctctctgaatctctgtggaaattagatctgatacacctgtaatcactatcggattatcctccgtaagacgattaaccaacaacatataattataagactttacttttctaaattcataaagttgctggattaggctataggtgtctccatgtacatacgcgttctcgagcgcaggaagtttaataccgaatagtgccatcagaataggatgaatatagtaattagtttctggttttctataaataaaagacaaatcttgtgaactagacatatcggtaaaatgcatggattggaatcgtgtagtcgacagaagaatatgatgattagatggagagtatattttatctaactctttgagttggtcaccgattctaggactagctcgagaatgaataagtactaaaggatgagtacatttcacagaaacactagcattgttcaatgtgctctttacatgggtaaggagttgaaatagctcgtttctatttgttctgacaatatttagtttattcataatgttaagcatatcctgaatagtaaagttagatgtgtcatacttgttagtagttagatatttagcaattgcattcccatcatttctcaatctcgtactccaatcatgtgtagatgctacttcatctatagaaaccatacaatcctttttgataggctgttgagattgattatttcctgcacgtttaggtttggtacgttgatttctagcccctgcggatataaagtcatcgtctacaatttgggacaatgaattgcatacactacaagacaaagatttatcagaagtgtgaatatgatcttcatctaccaaagaaagagtttgattagtataactagattttagtcctgcgttagatgttaaaaaaacatcgctattgaccacggcttccattatttatattcgtagtttttactcgaaagcgtgattttaatatccaatcttattacttttggaatcgttcaaaacctttgactagttgtagaatttgatctattgccctacgcgtatactcccttgcatcatatacgttcgtcaccagatcgtttgtttcggcctgaagttggtgcatatctctttcaacattcgacatgagatccttaagggccatatcgtctagattttgttgagatgttgctcctggatttggattttgttgtgctgttgtacatactgtaccaccagtaggtgtaggagtacatacagtggccacaataggaggttgaggaggtgtaaccgttggagtagtacaagaaatacttccatccgattgttgtgtacatgtagttgttggtaacgtctgagaaggttgggtagatggcggtgtcgtcgtcttttgatctttattaaatttagagataatatcctgaacagcattgctcggcgtcaacgctggaaggagtgaactcgccggcgcatcagtatcttcagacagccaatcaaaaagattagacatatcagatgatgtattagtttgttgtcgtggttttggtgtaggagcagtactactaggtagaagaataggagccgatgtagctgttggaaccggctgtggagttatatgaatagttggttgtagcggttggataggctgtctgctggcggccatcatattatctctagctagttgttctcgcaactgtctttgataatacgactcttgagactttagtcctatttcaatcgcttcatcctttttcgtatccggatccttttcttcagaataatagattgacgactttggtgtagaggattctgccagcctctgtgagaacttgttaaagaagtccatttaaggctttaaaattgaattgcgattataagattaaatggcagacacagacgatattatcgactatgaatccgatgatctcaccgaatacgaggatgatgaagaagaggaagaagatggagagtcactagaaactagtgatatagatcccaaatcttcttataagattgtagaatcagcatccactcatatagaagatgcgcattccaatcttaaacatatagggaatcatatatctgctcttaaacgacgctatactagacgtataagtctatttgaaatagcgggtataatagcagaaagctataacttgcttcaacgaggaagattacctctagtttcagaattttctgacgaaacgatgaagcaaaatatgctacatgtaattatacaagagatagaggagggttcttgtcctatagtcatcgaaaagaacggagaattgttgtcggtaaacgattttgacaaagatggtctaaaattccatctagactatattatcaaaatttggaaacttcaaaaacgatattagaatttatacgaatatcgttctctaaatgtcacaatcaagtctcgcatgttcagcaatttattgtcgtactttatatcgtgttcattaacgatatcttgcaaaatagtaatgattctatcttccttcgatagatattcttcagagattattgtcttatattctttcttgttatcagatatgaatttgataagactttgaacattattgatacccgtctgtttaattttttctacagatattttagttttggcagattctatcgtatctgtcaatagacatccaacatcgacattcgacgtcaattgtctataaatcaacgtataaattttagaaataacattagcgaattgttgtgcgttgatgtcgttattctgaaacagtatgattttaggtagcattttcttaacaaagagaacgtatttattgttactcagttgaacagatgatatatccagattactaacgcatctgattccgtataccaaactttcagaagaaatggtatacaattgtttgtattcattcaatgtctctttttcagaaattagtttagagtcgaatactgcaataattttcaagagatagttttcatcagataagattttatttagtgtagatatgataaaactattgttttgttggagaacttgatacgccgcgttctctgtagtcgacgctctcaaatgggaaacaatctccattatttttttggaatcggatactatatcttcggtatcttgacgcagtctagtatacatagagttaagagagattagagtttgtacattaagcaacatgtctctaaatgtggctacaaacttttcctttttcacatcatctagtttattatataccgatttcacaacggcaccagatttaaggaaccagaatgaaaaactctgataactacaatatttcatcatagttacgattttatcatcttctatagttggtgtaatagcgcatacctttttctccaagactggaaccaacgtcataaaaatgtttaaatcaaaatccatatcaacatctgatgcgctaagaccagtctcgcgttcaagattatctttactaatggtgacgaactcatcgtataaaactctaagtttgtccattatttatttacagatttagttgtttaatttatttgtgctcttccagagttgggatagtatttttctaacgtcggtattatattattaggatctacgttcatatgtatcataatattaatcatccacgttttgataaatctatctttagcttctgaaataacgtatttaaacaaaggagaaaaatatttagctacggcatcagacgcaataacattttttgtaaatgtaacgtatttagacgacagatcttcgttaaaaagttttccatctatgtagaatccatcggttgttaacaccattcccgcgtcagattgaataggagtttgaatagtttgttttggaaatagatccttcaataacttatagttgggtgggaaaaaatcgattttatcactagactctttcttttttactatcattacctcatgaactatttcttgaatgagtatatgtattttctttcctatatcggacgcgttcattggaaaatataccatgtcgttaactataagaatatttttatcctcgtttacaaactgaataatatcagatgtagttcgtaaacgaactatatcatcaccagcacaacatctaactatatgatatccactagtttcctttagccgtttattatcttgttccatattagcagtcattccatcatttaagaaggcgtcaaagataatagggagaaatgacattttggattctgttacgactttaccaaaattaaggatatacggacttactatctttttctcaacgtcaatttgatgaacacacgatgaaaatgtgcttctatgagattgatcatgtagaaaacaacaagggatacaatatttccgcatatcatgaaatatattaagaaatcccaccttattatatttccccaaaggatccatgcacgtaaacattatgccgttatcattaataaagacttctttctcatcggatctgtaaaagttgttactgatttttttcattccaggatctagataattaataatgatgggttttctattcttattctttgtattttggcatatcctagaccagtaaacagtttccactttggtaaaatcagcagacttttgaacgctattaaacatggcattaatggcaataactaaaaatgtaaaatatttttctatgttaggaatatggtttttcactttaatagatatatggtttttggccaaaatgatagatatttttttatccgaggatagtaaaatattattagtcgccgtctctataaaaatgaagctagtctcgatatccaattttattctagaattgataggagtcgccaaatgtaccttatacgttatatctcccttgatgcgttccatttgtgtatctatatcggacacaagatctgtaaatagttttacgttattaatcatcacggtatcgccgtcgctagataacgctaatgtaccatccaagtcccaaatggagagatttaactgttcatcgtttagaataaaatgattaccggtcatattaataaagtgttcatcgtatctagataacaacgacttataattaatgtccaagtcttgaactcgctgaatgatcttttttaacccagttagttttagattggtacgaaatatattgttaaactttgattctacagtaatgtccaaatctagttgtggaaatacttccatcaacattgtttcaaacttgataatattattatctacatcttcgtacgatccaaattccggaatagatgtatcgcacgctctggccacccagataaccaaaaagtcacacgctccaggatatacattgtataaaaagctatcgttttttagtagggtttttttctgcgtgtatacgaagggattaaaaatagtattatcaacgtaactatattccaaattattcttatgagaatagataataatatcgtccttaatatctaacaaatttcctaaatatccctttaattgagtcattcgaagcgtcaatagaatatgtctcttaactatttccggctgttgtatatttaaatgacttcgtaaaaaataatatatgggcgacttctcatctatgtaatcatatggagtgagatatagggctcgttctacctcctgccccttacccacctgtaataccaattgcggacttactatatatcgcatatttatatcgtggggtaaagtgaaaatctactaccgatgatgtaagtcttacaatgttcgaaccagtaccagatcttaatttggaggcctccgtagaactaggggaggtaaatatagatcaaacaacacctatgataaaggagaatagcggttttatatcccgcagtagacgtctattcgcccatagatctaaggatgatgagagaaaactagcactacgattctttttacaaagactttattttttagatcatagagagattcattatttgttcagatgcgttgacgctgtaaaagacgtcactattaccaaaaaaaataacattatcgtggcgccttatatagcacttttaactatcgcatcaaaaggatgcaaacttacagaaacaatgattgaagcattctttccagaactatataatgaacatagtaagaaatttaaattcaactctcaagtatccatcatccaagaaaaactcggataccagtttggaaactatcacgtttatgattttgaaccgtattactctacagtagctctggctattcgagatgaacattcatctggcatttttaatatccgtcaagagagttatctggtaagttcattatctgaaataacatatagattttatctaattaatctaaaatctgatcttgttcaatggagtgctagtacgggcgctgtaattaatcaaatggtaaatactgtattgattacagtgtatgaaaagttacaactggtcatagaaaatgattcacaatttacatgttcattggctgtggaatcaaaacttccaataaaattacttaaagatagaaatgaattatttacaaaattcattaacgagttaaaaaagaccagttcattcaagataagcaaacgcgataaggatacgctactaaaatattttacttaggactggagttagaatttatagacgactcatttcgtttatcattgttactattattactattactatcattattagtgttggcattattagtattcttcttgtcatcttgttcagaaatatacagcaatgctatacctaatactaaatacattatcatgctcgcaatggctctaacaacaacgaaccaaaatgaatttggtcgtagcttttgttcacaaaaatacataaagaaatgtctacataaatctatggcgccattggctacttgaaatagcgccagtcctcctacagattttaatatagctgtataacatgacatttattcatcatcaaaagagacagagtcaccatctgtcatatttagattttttttcatgtgttcaaagtatcctctactcatttcattataatagtttatcatacttagaattttaggacggatcaatgagtaagacttgactagatcgtcagtagtaatttgtgcatcgtctattctgcatccgcttcgtcgaataatgtatagcatcgctttgagattctccatagctatcaagtctttatacaatgacatggaaatatctgtgaatactttatacttctccaacatcgatgccttaacatcatcgcctactttagcattgaaaatacgttctattgtgtagatggatgtagcaagatttttaaacaacaatgccatcttacacgatgattgcctcaagtctccaatcgtttgtttagaacgattagctacagagtccaatgcttggctgactagcatattattatctttagaaattgtattcttcaatgaggcgtttatcatatctgtgatttcgttagtcatattacagtctgactgggttgtaatgttatccaacatatcacctatggatacggtacacgtaccagcatttgtaataatcctatctaagatgttgtatggcattgcgcagaaaatatcttctcctgtaatatctccactctcgataaatctactcagattattcttaaatgccttattctctggagaaaagatatcagtgtccatcatttcattaatagtatacgcagaaaagataccacgagtatcaattctatccaagatacttatcggttccgagtcacagataatggtttcctctccttcgggagatcctgcatagaaatatctaggacaatagtttctatactgtctgtaactctgataatctctaaagtcactaactgataccatgaaattgagaagatcaaacgctgaagtaattaatttttctgcctcgtttttactacaactagttttcatcaatgtagtgacgatgtattgtttagttacttttggtctaatactgatgatagagatattattgcttcccataatggatcttctagtagtcaccttaaagcccattgatgcgaatagcagatagataaagtcttggtatgactcctttctaatatagtacggactacctttgtcacccaactttatacccacataagccataacaacctctttaatagccgtttcatgaggtttatcagccatgagcctgagtagttggaagaatctcatgaatcccgtctcagaaagtcctatatgcatgatagatttatctttcctgggaaactctcgtatagtcatagatgaaatactcttcaaagtttctgaaataagattagtaacagtcttacctccgactactctaggtaacaaacaaactctaataggtgttttctctgcggagataatatcagaaaggatagagcaataagtagtattattgtgattataaagaccgaatacataacaggtagaatttataaacatcatgtcctgaaggtttttagacttgtattcctcgtaatccataccgtcccaaaacatggatttggtaactttgatagccgtagatctttgttccttcgccaacaggttaaagaaattaataaagaatttgttgtttctatttatgtccacaaattgcacgtttggaagcgccacggttacattcactgcagcattttgaggatcgcgagtatgaagtacgatgttattgtttactggtatatctggaaagaaatctaccagtctaggaataagagattgatatcgcatagaaatagtaaagtttataatctcatcatcgaagagcattttgttaccattgtaataaatatccactctgtcatatgtataaatgaagtactgttcaaacatgatgagatgtttatatgttggcatagtagtgagatcgacgtttggtaatggcaatgtattaagattaactccataatgtctagcagcatctgcgatgttataagcgtcgtcaaagcggggtcgatcttgtattgttatatattgtctaacacctataagattatcaaaatcttgtctgcttaatacaccgttaacaatttttgccttgaattcttttattggtgcattaataacatccttatagaggatgttaaacaaataagtgttatcaaagttaagatctggatatttcttttctgctagaacatccattgagtcggagccatctggtttaatataaccaccgataaatctagctctgtattctgtatccgtcaatctaatattaagaaggtgttgagtgaaaggtggaagatcgtaaaagctgtgagtattaatgataggattagtttccgaactaatgttaattggggtattaataatatctatatttccagcgttaagtgtaacattaaacagttttaattcacgtgacgtggtatcaattaaataattaatgcccaatttggatatagcagcctgaagctcatcttgtttagttacggatcctaatgagttattaagcaatatatcgaacggatgaacgaaggttgttttaagttggtcacatactttgtaatctagacatagatgcggaagaacggtagaaactatacgaaataaatattcagagtcctctaattgatcaagagtaactattgacttaataggcatcatttatttagtattaaatgacgaccgtaccagtgacggatatacaaaacgatttaattacagagttttcagaagataattatccatctaacaaaaattatgaaataactcttcgtcaaatgtctattctaactcacgttaacaacgtggtagatagagaacataatgccgccgtagtgtcatctccagaggaaatatcctcacaacttaatgaagatctatttccagatgatgattcaccggccactattatcgaacgagtacaacctcatactactattattgacgatactccacctcctacgtttcgtagagagttattaatatcggaacaacgtcaacaacgagaaaaaagatttaatattacagtatcgaaaaatgctgaagcaataatggaatctagatctatgataacttctatgccaacacaaacaccatccttgggagtagtttatgataaagataaaagaattcagatgttagaggatgaagtggttaatcttagaaatcaacgatctaatacaaaatcatctgataatttagataattttaccaaaatactatttggtaagactccgtacaaatcaacagaagttaataagcgtatagccatcgttaattatgcaaatttgaacgggtcccccttatcagtcgaggacttggatgtttgttcggaggatgaaatagatagaatctataaaacgattaaacaatatcacgaaagtagaaaacgaaaaattatcgtcactaacgtgattattattgtcataaacattatcgagcaggcattgctaaaactcggatttgaagaaatcaaaggactgagtaccgatatcacttcagaaattatcgatgtggagatcggagatgactgcgatgctgtagcatctaaactaggaatcggtaacagtccggttcttaatattgtattgtttatactcaagatattcgttaaacgaattaaaattatttaatttaatacattcccatatccagacaacaatcgtctggattaatctgttcctgtcgtctcataccggacgacatattaatctttttattagtgggcatctttttagatggtttctttttcccagcattaactgagtcgatacctagaagatcgtgattgatctctccgaccattccacgaacttctaattggccgtctctgacggtaccataaactattttaccagcattagtaacagcttggacaatctgaccatccatcgcattgtacgatgtagtagtaactgttgttctacgtctaggagcaccagaagtatttttggagcccttggatgttgatgtagaagaagacgaggattttgattttggtttacatgtaatacattttgaactctttgattttgtatcacatgcgccggcagtcacatctgtttgagaattaagattattgttgcctcctttgacggctgcatctccaccgatttgcgctagtagatttttaagctgtggtgtaatcttattaactgtttcgatataatcatcgtaactgcttctaacggctaaattttttttatccgccatttagaagctaaaaatatttttatttatgcagaagatttaactagattatacaatgaactaatatgatccttttccagattatttacaaacttggtattttttggttctggaggaggcgaatttaaattcggacttggattcggattttgtaagttcttgatcttattatacatcgagtataggatggcgacagtaactgctacacaaataccgatcaaaagaagaataccaatcatttattgacaataacttcactattgatcaagtatgcaatatatcatcttttcactaaataagtagtaataatgattcaacaatgtcgagatatatggacgataataatttagttcatggaaatatcgctatgattggtgtgaatgactccgctaactctgtggggtgcgcagtgctttccccacatagaataaattagcattccgactgtgataataataccaagtataaacgccataatactcaatactttccatgtacgagtgggactggtagacttactaaagtcaataaaggcgaagatacacgaaagaatcaaaagaatgattccagcgattagcacgccggaaaaataatttccaatcataagcatcatgtccatttaactaataaaaattttaaatcgccgaatgaacaaagtggaatataaaccatataaaaacaatagtttgtactgcaaaaataatatctatttttgttttcgaagatatggtaaaattaaatagtagtacacagcatgttataactaacagcagcaacggctcgtaattacttatcatttactagacgaaaaggtggtgggatattttcttgctcaaataatacgaatatatcacccatccattttatgcgatgtttatatactctaatctttaatagatctatagacgacgggtttaccaacaatatagattttatcgattcatctaatttaaacccttccttaaacgtgaatgatctattatctggcataacgatgaccctacctgatgaatcggacaatgtactgggccatgtagaataaattatcaacgaattatcgtctacgaacatttatatcatttgttttaattttaggacgcgaataaatggatataaaatagaaaataacagatattacaaccagtgttatggccgcgcccaaccaggtaggcagttttattttatcttttactacaggttctcctggatgtacgtcaccaacggcggacgtagttctagtacaattagacgtaagttccgcttgggaattttttaacgctaaagagttaacgttaatcgtgcacccaacgtatttacatctagttcgttgaacatcttgattataatataaccattttctatctctagattcgtcagtgcactcatgtaaccaacataccctaggtcctaaatatttatctccggaattagattttggataattcgcgcaccaacaatttctatttcctttatgatcgttacaaaagacgtataatgccgtatccccaaaagtaaaataatcaggacgaataattctaataaactcagaacaatatctcgcatccatatgtttggagcaaatatcggaataagtagacatagccggtttccgttttgcacgtaaccattctaaacaattggggtttccaggatcgtttttacaaaatccagtcatgaaatcatcacaatgttctgtcttgtaattattattaaatatttttggacagtgtttggtatttgtcttagaacaacattttgctacgctatcactatcgcccaggagataatccttttttataaaatgacatcgttgcccggatgctatataatcagtggcgtgttttaaatccttaatatattcaggagttacctcgttctgataatagattaatgatccaggacgaaatttgaaagaactacatggttctccatgaattaatacatattgtttagcaaattcaggaactataaaactactacaatgatctatcgacataccatctatcaaacaaaacttgggtttaatttctcccggagatgtttcataatagtacgtataactttcttctgcaaacttaacagctctattatattcaggataattaaaacctaattccatatatttgtctcgtatatctgctattcctggtgctattttgattctattaagagtaacagctgcccccattcttaataatcgtcagtatttaaactgttaaatgttggtatatcaacatctaccttatttcccgcagtataaggtttgttgcaggtatactgttcaggaatggttacatttatacttcttctatagtcctgtctttcgatgttcatcacatatgcaaagaacagaataaacaaaataatgtaagaaataatattaaatatctgtgaattcgtaaatacattgattgccataataattacagcagctacaatacacacaatagacattcccacagtgttgccattacctccacgatacatttgagttactaagcaataggtaataactaagctagtaagaggcaatagaaaagatgagataaatatcatcaatatagagattagaggagggctatatagagccaagacgaacaaaatcaaaccgagtaacgttctaacatcattatttttgaagattcccaaataatcattcattcctccataatcgttttgcatcatacctccatctttaggcataaacgattgctgctgttcctctgtaaataaatctttatcaagcactccagcacccgcagagaagtcgtcaagcatattgtaatatcttaaataactcatttatatattaaaaaatgtcactattaaagatggagtataatctttatgccgaactaaaaaaaatgacttgtggtcaacccctaagtctttttaacgaagacggggatttcgtagaagttgaaccgggatcatcctttaagtttctgatacctaagggattttacgcctctccttccgtaaagacgagtctagtattcgagacattaacaacgaccgataataaaatcactagtatcaatccaacaaatgcgccaaagttatatcctcttcaacgcaaagtcgtatctgaagtagtttctaatatgaggaaaatgatcgaatcaaaacgtcctctatacattactcttcacttggcgtgtggatttggtaagactattaccacgtgttatcttatggctacacacggtagaaaaaccgtcatttgcgtacccaataaaatgttaatacatcaatggaagacacaggtagaggcagtcggattggaacataagatatccatagatggagtaagtagtctattaaaggaactaaagactcaaagtccggatgtattaatagtagtcagtagacatctgacaaacgatgccttttgtaaatatatcaataagcattatgatttgttcatcttggatgaatcacatacgtataatctgatgaacaatacagcagttacaagatttttagcgtattatcctccgatgatgtgttattttttaactgctacacctagaccatctaaccgaatttattgtaacagtattattaatattgccaagttatccaatctaaaaaaaactatctatgcagtagatagtttttttgagccatattccacagataatattagacatatggtaaaacgactagatggaccatctaataaatatcatatatataccgagaagttattatctgtagacgagcctagaaatcaacttattcttgataccctggtagaagaattcaagtcaggaactattaatcgcattttagttattactaaactacgtgaacatatggtattattctacaaacgattattagattttttcggaccagaggttgtatttataggagacgcccaaaatagacgtactccagatatggtcaaatcaatcaaggaactaaatagatttatattcgtatccaccttattttattccggtactggtttagatattcctagtttggattcgttgttcatttgctcggcagtaatcaacaatatgcaaatagagcaattactagggagggtatgtcgagaaacagaactattagataggacggtatatgtatttcctaacacatccatcaaagaaataaagtacatgataggaaatttcatgcaacgaattattagtctgtctgtagataaactaggatttaaacaaaaaagttatcggaaacatcaagaatccgatcccacttctgcatgtacaacatcatccagagaagaacgtgtattaaatagaatatttaactcgcaaaatcgttaagaagtttaagcgacgatccgcatgctgcgcaggccagtgtattacccctcatagtattaatataatccaatgatacttttgtgatgtcggaaatcttaaccaatttagactgacaggcagaacacgtcatgcaatcatcatcgtcatcgataactgtagtcttgggcttctttttgcgactcttcattccggaacgcacattggtgctatccatttaggtagtaaaaaataagtcagaatatgccctataacacgatcgtgcaaaacctggtatatcgtctctatctttatcacaatatagtgtatcgacatttttattattattgacctcgtttatcttggaacatggaatgggaacatttttgttatcaacggccatctttgccttaattccagatgttgtaaaattataactaaacagtctatcatcgacacaaatgaaattcttgtttagacgtttgtagtttacgtatgcggctcgttcgcgtctcattttttcagatattgcaggtactataatattaaaaataagaatgaaataacataggattaaaaataaagttatcatgacttctagcgctgatttaactaacttaaaagaattacttagtctgtacaaaagtttgagattttcagattctgcggctatagaaaagtataattctttggtagaatggggaacatctacttactggaaaataggcgtgcaaaaggtagctaatgtcgagacgtcaatatctgattattatgatgaggtaaaaaataaaccgtttaatattgatccgggctattacattttcttaccggtatattttgggagcgtctttatttattcgaagggtaaaaatatggtagaacttggatctggaaactcttttcaaataccagatgatatgcgaagtgcgtgtaacaaagtattagacagcgataacggaatagactttctgagatttgttttgttaaacaatagatggataatggaagatgctatatcaaaatatcagtctccagttaatatatttaaactagctagtgagtacggattaaacatacccaaatatttagaaattgaaatagaggaagacacattatttgacgacgagttatactctattatagaacgctctttcgatgataaatttccaaaaatatccatatcgtatattaagttgggagaacttagacggcaagttgtagactttttcaaattctcattcatgtatattgagtccatcaaggtagatcgtataggagataatatttttattcctagcgttataacaaaatcaggaaaaaagatattagtaaaagatgtagaccatttaatacgatccaaggttagagaacatacatttgtaaaagtaaaaaagaaaaacacattttccattttatacgactatgatggaaacggaacagaaactagaggagaagtaataaaacgaattatagacactataggacgagactattatgttaacggaaagtatttctctaaggttggtagtgcaggcttaaagcaattgactaataaattagatattaatgagtgcgcaactgtcgatgagttagttgatgagattaataaatccggaactgtaaaacgaaaaataaaaaaccaatcagcatttgatttaagcagagaatgtttgggatatccagaagcggattttataacgttagttaataacatgcggttcaaaatagaaaattgtaaggttgtaaatttcaatattgaaaatactaattgtttaaataacccgagtattgaaactatatatggaaactttaaccagttcgtctcaatctttaatgtcgtcaccgatgtcaaaaaaagattattcgagtgaaataatatgcgcctttgatataggtgcaaaaaatcctgccagaactgttttagaagtcaaggataactccgttagggtattggatatatcaaaattagactggagttctgattgggaaaggcgcatagctaaagatttgtcacaatatgaatacactacagttcttctagaacgtcagcctagaaggtcgccgtatgttaaatttatctattttattaaaggctttttatatcatacatcggctgccaaagttatttgcgtctcgcctgtcatgtctggtaattcatatagagatcgaaaaaagagatcggtcgaagcatttcttgattggatggacacattcggattgcgagactccgttccggatagacgcaaattagacgatgtagcggatagtttcaatttggctatgagatacgtattagataaatggaatactaattatacaccttataataggtgtaaatctagaaattacataaaaaaaatgtaataacgttagtaacgccattatggataatctatttacctttctacatgaaatagaagatagatatgccagaactatttttaactttcatctaataagttgcgatgaaataggagatatatatggtcttatgaaagaacgcatttcctcagaggatatgtttgataatatagtgtataataaagatatacatcctgccattaagaaactagtgtattgcgacatccaacttactaaacacattattaatcagaatacgtatccggtatttaacgattcttcacaagtgaaatgttgtcattatttcgacataaactcagataatagcaatattagctctcgtacagtagagatatttgagagggaaaagtcatctcttgtatcatatattaaaactaccaataagaagagaaaggtcaattacggcgaaataaagaaaactgttcatggaggcactaatgcaaattacttttccggtaaaaagtctgacgagtatctgagtactacagttagatccaacattaatcaaccttggatcaaaaccatttctaagagaatgagagtagatatcattaatcactctatagtaacgcgtggaaaaagctctatattacaaactatagaaattatttttactaatagaacatgtgtgaaaatattcaaggattctactatgcacattattctatccaaggacaaggatgaaaaggggtgtatacacatgattgacaaattattctatgtctattataatttatttctgttgttcgaagatatcatccaaaacgagtactttaaagaagtagctaatgttgtaaaccacgtactcacggctacggcattagatgagaaattattcctaattaagaaaatggctgaacacgatgtttatggagttagcaatttcaaaatagggatgtttaacctgacatttattaagtcgttggatcataccgttttcccctctctgttagatgaggatagcaaaataaagttttttaaggggaaaaagctcaatattgtagcattacgatctctggaggattgtataaattacgtgactaaatccgagaatatgatagaaatgatgaaggaaagatcgactattttaaatagcatagatatagaaacggaatcggtagatcgtctaaaagaattgcttctaaaatgaaaaaaaacactgattcagaaatggatcaacgactcggatataagtttttggtgcctgatcctaaagccggagttttttatagaccgttacatttccaatatgtatcgtattctaattttatattgcatcgattgcatgaaatcttgaccgtcaagcggccactcttatcgtttaagaataatacagaacgaattatgatagaaattagcaatgttaaagtgactcctccagattactcacctataatcgcgagtattaaaggtaagagttatgacgcattagccacgttcactgtaaatatctttaaagaggtaatgaccaaagagggtatatccatcactaaaataagtagttatgagggaaaagattctcatttgataaaaattccgctactaataggatacgggaataaaaatccacttgatacagccaagtatcttgttcctaatgtcataggtggagtctttatcaataaacaatctgtcgaaaaagtaggaattaatctagtagaaaagattacaacatggccaaaatttagggttgttaagccaaactcattcactttctcgttttcctccgtatcccctcctaatgtattaccgacaagatatcgccattacaagatatctctggatatatcacaattggaagcgttgaatatatcatcgacaaagacatttataacggtcaatattgttttgctgtctcaatatttatctagagtgagtctagaattcattagacgtagtttatcatacgatatgcctccagaagttgtctatctagtaaacgcgataatagatagtgctaaacgaattactgaatctattactgactttaatattgatacatacattaatgacctggtggaagctgaacacattaaacaaaaatctcagttaacgattaacgagttcaaatatgaaatgctgcataactttttacctcatatgaactatacacccgatcaactaaagggattttatatgatatctttactaagaaagtttctctactgtatcttccacacttctagatatccagatagagattcgatggtttgtcatcgcatcctaacgtacggcaaatattttgagacgttggcacatgatgaattagagaattacataggcaacatccgaaacgatatcatgaacaatcacaagaacagaggcacttacgcggtaaacattcatgtactaacaactcccggacttaatcacgcgttttctagcttattgagtggaaagttcaaaaagtcagacggtagttatcgaacacatcctcactattcatggatgcagaatatttctattcctaggagtgttggattttatccggatcaagtaaagatttcaaagatgttttctgtcagaaaataccatccaagtcaatatctttacttttgttcatcagacgttccggaaagaggtcctcaggtaggtttagtatctcaattgtctgtcttgagttccattacaaatatactaacgtctgagtatttggatttggaaaagaaaatttgtgagtatatcagatcatattataaagatgatataagttactttgaaacaggatttccaatcactatagaaaatgctctagtcgcatctcttaatccaaatatgatatgtgattttgtaactgactttagacgtagaaaacggatgggattcttcggtaacttggaggtaggtattactttagttagggatcacatgaatgaaattcgcattaatattggagcgggaagattagtcagaccattcttggttgtggataacggagagctcatgatggatgtgtgtccggagttagaaagcagattagacgacatgacattctctgacattcagaaagagtttccgcatgtcatcgaaatggtagatatagaacaatttacttttagtaacgtatgtgaatcggttcaaaaatttagaatgatgtcaaaggatgaaagaaagcaatacgatttatgtgactttcctgccgaatttagagatggatatgtagcatcttcactagtgggaatcaatcacaattctggacccagagctattcttggatgtgctcaagctaaacaagctatctcttgtctgagttcggatatacgaaataaaatagacaatggaattcatttgatgtatccagagaggccaattgtcattagtaaggctttagaaacttcaaagattgcggctaattgcttcggacaacatgttactatagcattaatgtcgtacaaaggtatcaatcaagaggatggaattatcatcaaaaaacaatttattcagagaggcggtctcgatatagttaccgcaaagaaacatcaagtagaaattccgttggaaaactttaataacaaagaaagagataggtctaacgcctattcaaaattagaaagtaatggattagttagactgaatgctttcttggaatccggagacgctatggcacgaaatatctcatcaagaactcttgaagatgattttgctagagataatcagattagcttcgatgtttccgagaaatataccgatatgtacaaatctcgcgttgaacgagtacaagtagaacttactgacaaagttaaggtacgagtattaaccatgaaagaaagaagacccattctaggagacaaatttaccactagaacgagtcaaaagggaacagtcgcgtatgtcgcggatgaaacggaacttccatacgacgaaaatggtatcacaccagatgtcattattaattctacatccatcttctctagaaaaactatatctatgttgatagaggttattttaacagccgcatattctgctaagccgtacaacaataagggagaaaaccgacctgtctgttttcctagtagtaacgaaacatccatcgatacatatatgcaattcgctaaacaatgttatgagcattcaaatccgaaattgtctgatgaagaattatcggataaaatcttttgtgaaaagattctctatgatcctgaaacggataagccttatgcatccaaagtattttttggaccaatttattacttgcgtctgagacatttaactcaggacaaggcaaccgttagatgtagaggtaaaaagacgaagctcattagacaggcgaatgagggacgaaaacgtggaggaggtatcaagttcggagaaatggagagagactgtttaatagcgcatggtgcagccaatactattacagaagttttgaaagattcggaagaagattatcaagatgtgtatgtttgtgaaaattgtggagacatagcagcacaaatcaagggtattaatacatgtcttagatgttcaaaacttaatctctctcctctcttaacaaaaattgataccacgcacgtatctaaagtatttcttactcaaatgaacgccagaggcgtaaaagtcaaattagatttcgaacgaagacctccttcgttttataaaccattagataaagttgatctcaagccgtcttttctggtgtaatattctagtttggtagtagatacatatcaatatcatcaaattcgagatccgaattataaaatgggcgtggattgttaactatagaatcggacgtctgatattcgaaaatctgtggagtttcaggttttggtggaggtgtaactgctacttgggatactgaagtctgatattcagaaagctgggggatgttctggttcgacatccaccgatggtgttacaccactactaatcggttcggtaacgtctgtggacgatggaggcaccacttctacagaacctgtagcctcagttgtcaacggagatacatttttaatgcgagaaaatgtataatttggtaatggtttctcatgtggatctgaagaagaggtaagatatctactagaaagataccgatcacgttctagttctcttttgtagaacttaactttttctttctcagcatctagttgatattccaacctcttcacgttactacgttcagattccaattcacgttcgcatgggttacctccgcagtttttacgagcgatttcacgttcagccttcatgcgtctctccctctctttatcgagtttatcagagcagtctttctgaaggcgatcgaactccataaatttctccaacgctttgattgtttccatagatttccgaagttcagcttttaggactgtgattctttttctttcgaattcacagctggatgtacaaccgtttccattaccgccatctctaagtttcttttctagatcggcaacatttcatccccatgccttttacattcctcgagtctactgtcgtcgaaatatcgttccagctccttttcgacatcaataactttagcacgttgtctctcaagctctcttttgtagttatctgattccctggcacgtttaagatcttcatgcaattgagtcagctcttaacttcctctcttgcttcttcgtcatagtacgcgcaatcactgtgagatccattgttaccacgtctacactcggcgagctcgcgtttaagagattcaatttcccgtttgtattggtccatgtttccattgctaccaccattagatttacaggctgctagttgtcgttcgagatcagaaatacgggttttcttggaattgatttcgtcgatgtacttggcatcgaaacacttattaagttctttttccaattctacgattttatttctttcgcgagtcaattccctcctgtagtaactatctgttttgtcagattcacgctctctacgtagactttcttgcaagttactaatttgttccctagcacgtccgagtttagttttatatgctgaatagagttctgattcatcctttgagcagatctctagcgatcgtttaagattcctaattctagtctttagcctatttacctcctcagaagatgttccgttaccgttgcgtttacactcgttaagctgtctatcaagatccatgattctatctctaagacgttgcatctctctttccatatcagcattgctttcattattacgtctgcagtcactcaactgtctttcaatatctgagattctatctctaagacgtcgcatctctctctgtttcggcattggtttcattattacgtttacagtcgttcaactgtctttcaagatctgatattctagattggagtctgctaatctctgtagcattttcacggcattcactcagttgtctttcaagatctgaaattttagattggagtctgctaatctctgtaagatttcctcctccgctctcgatgcagtcggtcaacttattctctagttctctaatacgcgaacgcagtgcatcaacttcttgcgtgtcttcctggttgcgtgtacattcatcgagtctagattcgagatctctaacgcgtcgtcgttcttcctcaagttctctgcgtactacagaaagcgtgtccttatcttgttgatatttagcaatttctgattctagagtactgattttgcttacgtagttactaatatttgtcttggccttatcaagatcctccttgtatttgtcgcattccttgatatccctacgaagtctggacagttcccattcgacattacgacgtttatcgatttcagctcggagatcgtcatcgcgttgttttagccacatacgactgagttcaagttctcgttgacaagatccatctacttttccattcctaatagtatccagttccttttctagttctgaacgcatttctcgttccctatcaagcgattctctcaattctcggatagtcttcttatcaatttctaataaatctgaaccatcatctgtcccattttgaatatccctgtgttctttgatctcttttgtaagtcggtcgattctttcggttttataaacagaatccctttccaaagtcctaatcttactgagtttatcactaagttctgcattcaattcggtgagttttctcttggcttcttccaactctgttttaaactctccactatttccgcattcttcctcgcatttatctaaccattcaattagtttattaataactagttggtaatcagcgattcctatagccgttcttgtaattgtgggaacataattaggatcttctaatggattgtatggcttgatagcatcatctttatcattattagggggatggacaaccttaattggttggtcctcatctcctccagtagcgtgtggttcttcaataccagtgttagtaataggcttaggcaaatgcttgtcgtacgcgggcacttcctcatccatcaagtatttataatcgggttctacttcagaatattcttttctaagagacgcgacttcgggagttagtagaagaactctgtttctgtatctatcaacgctggaatcaatactcaagttaaggatagcgaatacctcatcgtcatcatccgtatcttctgaaacaccatcatatgacatttcatgaagtctaacgtattgataaatagaatcagatttagtattaaacagatccttaacctttttagtaaacgcatatgtatattttagatctccagatttcataatatgatcacatgccttaaatgtcagtgcttccatgatataatctggaacactaatgggtgacgaaaaagatacagcaccatatgctacgttgataaataaatctgaaccactaagtagataatgattaatgttaagaaagaggaaatattcagtgtataggtatgtcttggcgtcatatcttgtactaaacacgctaaacagtttgttaatgtgatcaatttccaatagattaattagagcagcgggaataccaacaaacatattaccacatccgtattttctatgaatatcacatatcatgttaaaaaatcttgatagaagagcgaatatctcgtctgacttaatgagtcgtagttcagcagcaacataagtcataactgtaaatagaacatactttcctgtagtgttgattctagactccacatcaacaccattattaaaaatagttttatatacatctttaatctgctctccgttaatcgtcgaacgttctagtatacggaaacactttgatttcttatctgtagttaatgacttagtgatatcacgaagaatattacgaattacatttcttgtttttcttgagagacctgattcagaactcaactcatcgttccatagtttttctacctcagtggcgaaatctttggagtgcttggtacatttttcaataaggttcgtgacctccatttattataaaaaatttattcaaaacttaactacaatcgggtaattataaaatcgtagatctcccatgtggcggaatactaccatctatcgcatgtggatggacagtaggtaatggccatgggaacagtaatgtttgcatatttatctttcttgccagtattactgcatattgtcccaatgtttcgatgtgatgttctaacctatcaactgccgctgtatcacaacaatagtgtccgatgaaattaagattatgatccaatgtgtttaatatatgattatcaagtcttatacgatccgcgtcttttttgacaggatcaggttcttctacaggaagaagtttcggcctcttatgatattcatgtctgggaaacggtggtctagggtgaggctccggtatcggagtgggttttggattataatcatcatcgtctatgacatcatcttcgacttcgatatttattttgctatcttgatgatgtcctgtatcagttgcattttcagcactcgactgaatattagcgcattcattgtctattattaccatatttctaaacccaaaatgtatgtgttgaacatcagtactatcgttgatgagtcttatagcatgaattcgcttatcgttatcgggtttatcttctgtcaccttagcaattccttttttattaaactctacataatcatatccatttctattgtttgttctaatataaacgagtatagcatcattgctaaatttttcaatagtatcaaaaacagaatatcctaaaccatataatatatattcaggaacactcaaactaaatgtccaggattctcctaaatacgtaaactttaatagtgcgaaatcattcaaaaatctaccacttatagatagatagtacataaatgcgtatagtagtctacctatctctttattatgaaaaccggcattacgatcatatatgtcgtgatatacctgtgatccgtttacgttaaaccataaatacatgggtgatcctataaacatgaatttatttctaattctcagagctatagttaattgaccgtgtaatatttgcttacatgcatacttgatacgcttattaataagatttttatcattgctcgttatttcagaatcgtatatataaggagtaccatcgtgattcttaccagatattatacaaaatactatatataaaatatattgacccacgttagtaatcatataaatgtttaacgttttaaattttgtattcaatgatccattatcatacgctatcatggtcttgtaatattcattctttaaaatataatattgtgttagccattgcattggagctcctaatggagattttctattctcatccattttaggataggctttcataaagtccctaataacttcgtgaataatgtttctatgttttctactgatgcatgtatttgcttcgatttttttatcccatgtttcatctatcatagatttaaacgcagtaatgctcgcaacattaacatcttgaaccgttggtacaattccgttccataaatttataatgttcgccatttatataactcattttttgaatatacttttaattaacaaaagagttaagttactcatatggacgccgtccagtctgaacatcaatctttttagccagagatatcatagccgctcttagagtttcagcgtgattttccaacctaaatagaacttcatcgttgcgtttacaacacttttctatttgttcaaactttgttgttacattagtaatctttttttccaaattagttagccgttgtttgagagtttcctcattgtcgtcttcatcggctttaacaattgcttcgcgtttagcctctggctttttagcagcctttgtagaaaaaaattcagttgctggaattgcaagatcgtcatctccggggaaaagagttccgtccatttaaagtacagattttagaaactgacactctgcgttatttatatttggtacaacacatggattataaatattgatgttaataacatcagaaaatgtaaagtctatacattgttgcatcgtgttaaattttctaatggatctagtattattgggtccaacttctgcctgaaatccaaatatggaagcggatacaaaaccgtttcctggataaaccacacatctccacttttgctttacatcagaaattgtgtcgttgacatcttgaactctcctatctaatgccggtgttccacctatagattttgaatattcgaatgctgcatgagtagcattaaattccttaatattgccataattttcatatattgagtaaccctggataaaaagtaaacacaccgcagccgtcgctaccacaataaaaaaaattgatagagagttcatttataatctattagaagctgacaaaatttttttacacgcatcagacaatgctttaataaatagttcaacatctacttttgtcatatcgaaccgatggtatgattctaacctagaattacatccgaaaaagttgactatgttcatagtcattaagtcattaacaaacaacattccagactctggattataagacgatactgtttcgtcacaattacctaccttaatcatgtgattatgaatattggctattagagcaccttctaagaaatctataatatctttgaaacacgatttaaaatcaaaccacgaatatacttctacgaagaaagttagtttacccataggagaaataactataaatggagatctaaatacaaaatccggatctatgatagttttaacattattatattctctattaaatacctccacatctaaaaatgttaattttgaaactatgtcttcgtttattaccgtacctgaactaaacgctataagctctattgtttgagaactctttaaacgatattcttgaaatacatgtaacaaagtttcctttaactcggtcggtttatctaccatagttacagaatttgtatccttatctataatataataatcaaaatcgtataaagttatataattatcgcgttcagattgggatcttttcaaatagactaaaaaccccatttctctagtaagtatcttatgtatatgtttgtaaaatatcttcatggtgggaatatgctctaccgcagttagccattcctcattgacagcggtagatgtattagacaaaactattccaatgtttaacaagggccattttacgagattattaaatccttgtttgataaatgtagccaatgagggttcgagttcaacgacgattgaattctcttcccgcggatgctgcatgatgaacgacgggatgttgttcgattgatttggaattctttttcgactttttgtttatattaaatattttaaaatttatagcggatagcaattcatgtaccacggataatgtagacgcgtattgcgcatcgatatctttattattagataaatttatcaataaatgtgagaagtttgcctcgttaaggtcttccatttaaatattatataaacatttgtgtttgtaacttattcgtcttttatggaatagttttttactagtaaagctgcaattacacactttgtccgtaaaacataaatataaacaccagcttttatcaatcgttccaaaaagtcgacggcggacatttttaacatggcatctattttaaatacacttaggtttttggaaaaaacatcattttataattgtaacgattcaataactaaagaaaagattaagattaaacataagggaatgtcatttgtattttataagccaaagcattctaccgttgttaaatacttgtctggaggaggtatatatcatgatgatttggttgtattggggaaggtaacaattaataatctaaagatgatgctattttacatggatttatcatatcatggagtgacaagtagtggagcaatttacaaattgggatcgtctatcgatagactttctctaaataggactattgttacaaaagttaataattatgatgatacattttttgacgacgatgattgatcgctattgcacaattttgtttttgtactttctaatatagtgtttaggttctttttcatatgagaatattgatttactaaaatatctatgtttaacttttgttctatgacgtccttatcggcggtatcggtacatatacgtaattcaccttcacaaaatacggagtcttcgataataatagccaatcgattattggatctagctgtctgtatcatattcaacatgtttaatatatcctttcgtttcccctttacaggcatcgatcgtagcatattttccgcgtctgatatggaaatgttaaaactacaaaaatgcgtaatgttagcccgtcctaatattggtacgtgtctataagtttggcatagtagaataatagacgtgtttaaatgccttccaaagtttaagaattctattagagtattgcattttgatagtttatcgcctacatcatcaaaaataagtaaaaagtgtgctgattttttatgattttgtgcgacagcaatacatttttctatgttacttttagttcgtatcagattatattctagagattcctgactactaacgaaattaatatgatttggccaaatgtatccatcataatctgggttataaacgggtgtaaacaagaatatatgtttatattttttaactagtgtagaaaacagagatagtaaatagatagtttttccagatccagatcctcctgttaaaaccattctaaacggcatttttaataaattttctcttgaaaattgtttttcttggaaacaattcataattatatttacagttactaaattaatttgataataaatcaaaatatggaaaactaaggttgttagtagggaggagaacaaagaaggcacatcgtgatataaataacatttattatcatgatgacaccagaaaacgacgaagagcagacatctgtgttctccgctactgtttacggagacaaaattcagggaaagaataaacgcaaacgcgtgattggtctatgtattagaatatctatggttatttcactactatctatgattaccatgtccgcgtttctcatagtgcgcctaaatcaatgcatgtctgctaacgaggctgctattactgacgccgctgttgccgttgctgctgcatcatctactcatagaaaggttgcgtctagcactacacaatatgatcacaaagaaagctgtaatggtttatattaccagggttcttgttatatattacattcagactaccagttattctcggatgctaaagcaaattgcactgcggaatcatcaacactacccaataaatccgatgtcttgactacctggctcattgattatgttgaggatacatggggatctgatggtaatccaattacaaaaactacatccgattatcaagattctgatgtatcacaagaagttagaaagtatttttgtgttaaaacaatgaactaatatttatttttgtacattaataaatgaaatcgcttaatagacaaactgtaagtaggtttaagaagttgtcggtgccggccgctataatgatgatactctcaaccattattagtggcataggaacatttctgcattacaaagaagaactgatgcctagtgcttgcgccaatggatggatacaatacgataaacattgttatttagatactaacattaaaatgtctacagataatgcggtttatcagtgtcgtaaattacgagctagattgcctagacctgatactagacatctgagagtattgtttagtattttttataaagattattgggtaagtttaaaaaagaccaatgataaatggttagatattaataatgataaagatatagatattagtaaattaacaaattttaaacaactaaacagtacgacggatgctgaagcgtgttatatatacaagtctggaaaactggttaaaacagtatgtaaaagtactcaatctgtactatgtgttaaaaaattctacaagtgacaacaaaaaatgaattaataataagtcgttaacgtacgccgccatggacgccgcgtttgttattactccaatgggtgtgttgactataacagatacattgtatgatgatctcgatatctcaatcatggactttataggaccatacattataggtaacataaaaactgtccaaatagatgtacgggatataaaatattccgacatgcaaaaatgctactttagctataagggtaaaatagttcctcaggattctaatgatttggctagattcaacatttatagcatttgtgccgcatacagatcaaaaaataccatcatcatagcatgcgactatgatatcatgttagatatagaagataaacatcagccattttatctattcccatctattgatgtttttaacgctacaatcatagaagcgtataacctgtatacagctggagattatcatctaatcatcaatccttcagataatctgaaaatgaaattgtcgtttaattcttcattctgcatatcagacggcaatggatggatcataattgatgggaaatgcaatagtaattttttatcataaaagttgtaaagtaaataataaaacaataaatattgaactagtagtacgtatattgagcaatcagaaatgatgctggtacctcttatcacggtgaccgtagttgcgggaacaatattagtatgttatatattatatatttgtaggaaaaagatacgtactgtctataatgacaataaaattatcatgacaaaattaaaaaagataaagagttctaattccagcaaatctagtaaatcaactgatagcgaatcagactgggaggatcactgtagtgctatggaacaaaacaatgacgtagataatatttctaggaatgagatattggacgatgatagcttcgctggtagtttaatatgggataacgaatccaatgttatggcgcctagcacagaacacatttacgatagtgttgctggaagcacgctgctaataaataatgatcgtaatgaacagactatttatcagaacactacagtagtaattaatgaaacggagactgttgaagtacttaatgaagataccaaacagaatcctaactattcatccaatcctttcgtaaattataataaaaccagtatttgtagcaagtcaaatccgtttattacagaacttaacaataaatttagtgagaataatccgtttagacgagcacatagcgatgattatcttaataagcaagaacaagatcatgaacacgatgatatagaatcatcggtcgtatcattggtgtgattagtttcctttttataaaattgaagtaatatttagtattattgctgccgtcacgttgtacaaatggagatattccctgtattcggcatttctaaaattagcaattttattgctaataatgactgtagatattatatagatacagaacatcaaaaaattatatctgatgagatcaatagacagatggatgaaacggtacttcttaccaacatcttaagcgtagaagttgtaaatgacaatgagatgtaccatcttattcctcatagattatcgacgattatactctgtattagttctgtcggaggatgtgttatctctatagataatgacatcaatggcaaaaatattctaacctttcccattgatcatgctgtaatcatatccccactgagtaaatgtgtcgtagttagcaagggtcctacaaccatattggttgttaaagcggatatacctagcaaacgattggtaacatcgtttacaaacgacatactatatgtaaacaatctgtcactgattaattatttgccgttgtctgtattcattattagacgagtcaccgactatttggatagacacatatgcgatcagatatttgctaataataagtggtattcccttataaccatcgacgataagcaatatcctattccatcaaactgtataggtatgtcctctgccaagtacataaattctagcatcgagcaagatactttaatccatgtttgtaacctcgagcatccgttcgactcagtatacaaaaaaatgcagtcgtacaattctctacctatcaaggaacaaatattgtacggtagaattgataatataaatatgagcattagtatttctgtggattaatagatttctagtatggggatcattaatcatctctaatctctaaatacctcataaaacgaaaaaaaagctattatcaaatactgtacggaatggattcattctcttctctttttatgaaactctgttgtatatctactgataaaactggaagcaaaaaatctgatagaaagaataagaataagatcaaggattatatggaacacgattattataaaataacaatagttcctggttcctcttccacgtctactagctcgtggtattatacacatgcctagtaatagtctctttgcgttgacggaaagcagactagaaataacaggctaaaatgttcagacaccataatagttcccaacccagataataacagagttccatcaacacattcctttaaactcaatcccaaacccaaaaccgttaaaatgtatccggccaattgatagtagataatgaggtgtacagcgcatgataatttacacagtaaccaaaatgaaaatactttagtaattataagaaatatagacggtaatgtcatcatcaacaatccgataatatgcctgagagtaaacattgacggataaaacaaaaatgctccgcataactctatcatggcaataacacaaccaaatacttgtaagattcctaaattagtagaaaatacaacgaatatcgatgtataagtgatctcgagaaataataagaataaagtaatgcccgtaaagataaacatcaacattgtttggtaatcattaaaccaattagtatgaagttgaactaatttcacagtagattttattccagtgttatcctcgcatgtataagtacctggtaagatatctttatattccataatcaatgagacatcactatctgataacgaatgaagtctagcactagtatgccatttacttaatattgtcgtcttggaagttttattataagttaaaatatcatggttatccaatttccatctaatatactttgtcggattatctatagtacacggaataatgatggtatcattacatgctgtatactctatggtctttgtagttgttataacaaccaacgtatagaggtatatcaacgatattctaactcttgacattttttatttatttaaaatgatacctttgttatttattttattctattttgctaacggtattgaatggcataagtttgaaacgagtgaagaaataatttctacttacttattagacgacgtattatacacgggtgttaatggggcggtatacacattttcaaataataaactaaacaaaactggtttaactaataataattatataacaacatctataaaagtagaggatgcggataaggatacattagtatgcggaaccaataacggaaatcccaaatgttggaaaatagacggttcagacgacccaaaacatagaggtagaggatacgctccttatcaaaatagcaaagtaacgataatcagtcacaacggatgtgtactatctgacataaacatatcaaaagaaggaattaaacgatggagaagatttgacggaccatgtggttatgatttattcacggcggataacgtaattccaaaagatggtttacgaggagcattcgtcgataaagacggtacttatgacaaagtttacattcttttcactgatactatcggctcaaagagaattgtcaaaattccgtatatagcacaaatgtgcctaaacgacgaaggtggtccatcatcattgtctagtcatagatggtcgacgtttctcaaagtcgaattagaatgtgatatcgacggaagaagttatagacaaattattcattctagaactataaaaacagataatgatacgatactatatgtattcttcgatagtccttattccaagtccgcattatgtacctattctatgaataccattaaacaatctttttctacgtcaaaattggaaggatatacaaagcaattgccgtctccagctcctggtatatgtttaccagctggaaaagttgttccacataccacgtttgaagtcatagaacaatataatgtactagatgatattataaagcctttatctaaccaacctatcttcgaaggaccgtctggtgttaaatggttcgatataaaggagaaggaaaatgaacatcgggaatatagaatatacttcataaaagaaaattctatatattcgttcgatacaaaatctaaacaaactcgtagctcgcaagtcgatgcgcgactattttcagtaatggtaactgcgaaaccgttatttatagcagatatagggataggagtaggaatgccacaaatgaaaaaaatacttaaaatgtaatcttaatcgagtacaccacacgacaatgaacaaacataagacagattatgctggttatgcttgctgcgtaatatgcggtctaattgtcggaattatttttacagcgacactattaaaagttgtagaacgtaaattagttcatacaccattaatagataaaacgataaaagatgcatatattagagaagattgtcctactgactggataagctataataataaatgtatccatttatctactgatcgaaaaacctgggaggaaggacgtaatgcatgcaaagctctaaattcaaattcggatctaattaagatagagactccaaacgagttaagttttttaagaagccttagacgaggctattgggtaggagaatccgaaatattaaaccagacaaccccatataattttatagctaagaatgccacgaagaatggaactaaaaaacggaaatatatttgtagcacaacgaatactcccaaactgcattcgtgttacactatataacaattacactacatttttatcataccactacttcggttagatgttttagaaaaaaataaatatcgccgtaccgttcttgtttttataaaaataacaattaacaattatcaaattttttctttaatattttacgtggttgaccattcttggtggtaaaataatctcttagtgttggaatggaatgctgtttaatgtttccacactcatcgtatattttgacgtatgtagtcacatcgtttacgcaatagtcagactgtagttctatcatgcttcctacatcagaaggaggaacagttttaaagtctcttggttttaatctattaccgttagttttcatgaaatcctttgttttatccacttcacattttaaataaatgtccactatacattcttttgttaattttactagatcgtcatgggtcatagaatttataggttccgtagtccatggatccaaactagcaaacttcgcgtatacggtatcgcgattagtgtatacaccaactgtatgaaaattaagaaaacagtttaataaatcaacagaaatatttaatcctccgtttgatacagatgcgccatatttatggatttcggattcacacgttgtttgtctgaggtgttcgtctagtgttgcttctacgtaaacttcgattcccatatattctttattgtcagaatcgcataccgatttatcatcatacactgtttgaaaactaaatggtatacacatcaaaataataaataataacgagtacattctgcaatattgttatcgtaattggaaaattagtgttcgagtgagttggattatgtgagtattggattgtatattttattttatattttgtaataagaataaaatgctaatgtcaagtcttattaaaaacatatataataaataacaatggctgaatggcataaaataataagttcgaggatgccgccatcgttgattacaagactacaaagaatgttctagctgctattcctaacagaacatttgccaagattaatccgggtgaaattattcctctcatcactaatcgtaatattctaaaacctcttattggtcagaaatattgtattgtatatactaactctctaatggatgagaacacgtatgctatggagttgcttactgggtacgcccctgtatctccgatcgttatagcgagaactcataccgcacttatatttttgatgggtaagccaacaacatccagacgtgacgtgtatagaacgtgtagagatcacgctacccgtgtacgcgcaactggtaattaaaataaaaagtaatattcatatgtagtgtcaattttaaatgatgatgaaatggataatatccatattgacgatgtcaataatgccggtattggcatacagctcatcgatttttagatttcattcagaggatgtggaattatgttatgggcatttgtattttgataggatctataatgtagtaaatataaaatataatccgcatattccatatagatataattttattaatcgcacgttaaccgtagatgaactagacgataatgtcttttttacacatggttattttttaaaacacaaatatggttcacttaatcctagtttgattgtctcattatcaggaaacttaaaatataatgatatacaatgctcagtaaatgtatcgtgtctcattaaaaatttggcaacgagtacatctactatattaacatctaaacataagacttattctctacatcggtccacgtgtattactataataggatacgattctattatatggtataaagatataaatgacaagtataatgacatctatgattttactgcaatatgtatgctaatagcgtctacattgatagtgaccatatacgtgtttaaaaaaataaaaatgaactcttaattatgctatgctattagaaatggataaaatcaaaattacggttgattcaaaaattggtaatgttgttaccatatcgtataacttggaaaagataactattgatgtcacacctaaaaagaaaaaagaaaaggatgtattattagcgcaatcagttgctgtcgaagaggcaaaagatgtcaaggtagaagaaaaaaatattatcgatattgaagatgacgatgatatggatgtagaaagcgcataatactatctataaaaataagtatataataaatactttttatttacggtactcttgtagtggtgataccctactcgattatttttttaaaaaaaaaatacttattctgattcttctaaccatttccgtgttcgtttgaatgccacatcgacgtcaaagataggggagtagttgaaatctagttctgcattgttggtacgcacctcaaatgtagtgttggatatcttcaacgtatagttgttgagtagtgatggttttctaaatagaattctcttcatatcattcttgcacgcgtacatttttagcatccatcttggaatcctagatccttgttctattcccaatggtttcatcaatagaagattaaacatatcgtacgaacacgatggagagtaatcgtagcaaaagtaagcatttcctttaatcttagatcccggatactggatatattttgcagccaacacgtgcatccatgcaacatttcctacatatacccggctatgcaccgcgtcatcatcgactgtacgatacataatgttaccgtgttgcttacattgctcgtaaaagactttcgtcaatttgtctccttctccgtaaattctagtgggtcttaggcaacaagtatacaattttgctccattcatgattacggaattattggctttcataaccagttgctcggccatacgtttactttttgcgtatacatgtcctggtgatatatcataaagggtatgctcatggccgatgaatggatcaccgtgtttattgggtcctattgcttccatgctactagtatagatcaaatacttgattcctaggtccacacaagctgccaaaatagtctgtgttccataatagtttactttcatgatttcattatcggtgtattttccaaatacatccactagagcagccgtatgaataatcagatttaccccatctagcgcttctctcaccttatcaaagtcgtttatatcacattgtatatagtttataaccttaactttcgaggttattggttgtggatcttctacaatatctatgactctgatttcttgaacatcatctgcactaattaacagttttactatatacctgcctagaaatccggcaccaccagtaaccgcgtacacggccattgctgccactcataatatcagactacttattctattttactaaataatggctgtttgtataatagaccacgataatatcagaggagttatttactttgaaccagtccatggaaaagataaagttttaggatcagttattggattaaaatccggaacgtatagtttaataattcatcgttacggagatattagtcaaggatgtgattccataggcagtccagaaatatttatcggtaacatctttgtaaacagatatggtgtagcatatgtttatttagatacagatgtaaatatatctacaattattggaaaggcgttatctatttcaaaaaatgatcagagattagcgtgtggagttattggtatttcttacataaatgaaaagataatacattttcttacaattaacgagaatggcgtttgatatatcagttaatgcgtctaaaacaataaatgcattagtttacttttctactcagcaaaataaattagtcatacgtaatgaagttaatgatacacactacactgtcgaatttgatagggacaaagtagttgacacgtttatttcatataatagacataatgacaccatagagataagaggggtgcttccagaggaaactaatattggttgcgcggttaatacgccggttagtatgacttacttgtataataagtatagttttaaactgattttagcagaatatataagacacagaaatactatatccggcaatatttattcggcattgatgacactagatgatttggctattaaacagtatggagacattgatctattatttaatgagaaacttaaagtagactccgattcgggactatttgactttgtcaactttgtaaaggatatgatatgttgtgattctagaatagtagtagctctatctagtctagtatctaaacattgggaattgacaaataaaaaatataggtgtatggcattagccgaacatatatctgatagtattccaatatctgagctatctagactacgatacaatctatgtaagtatctacgcggacacactgagagcatagaggataaatttgattattttgaagacgatgattcgtctacatgttctgccgtaaccgacagggaaacggatgtataattttttttatagcgtgaaggatatgataaaaaatataattgttgtatttatcccattccaatcaccttatatgattctgtaacacaataaaggagtcttatagatgtatagaggtcagatactggtttgataaactgtttattccacataagtatgtttgactttatggttagacccgcatactttaacaaatcactgaaaattggagttaggtattgacctctcagaatcagttgccgttctggaacattaaatgtattttttatgatatactccaacgcatttatgtgggcatacaacaagtcattactaatggaatattccaagagttttagttgtctagtatttaacaagagaagagatttcaacagactgtttatgaactcgaatgccgcctcattgtcgcttatattgatgatgtcgaattctcccaatatcatcaccgatgagtagctcatcttgttatcgggatccaagttttctaaagatgtcattaaaccctcgatcatgaatggatttatcatcatcgtttttatgttggacatgagcttagtccgtttgtccacatctatagaagatgatttctgaattatttcatatatctctctctttaactccaggaacttgtcaggatggtctactttaatatgttctcgtctaagagatgaaaatctttggatggttgcacgcgacttttctctaaaggatgacgttgcccaagatcctctcttaaatgaatccatcttatccttggacaagatggacagtctattttccttagatggtttaatatttttgttacccatgatctataaaggtagacctaatcgtctcggatgaccatatatttattttcagttttattatacgcataaattgtaaaaaatatgttaggtttacaaaaatgtctcgtggggcattaatcgtttttgaaggattggacaaatctggaaaaacaacacaatgtatgaacatcatggaatctataccggcaaacacgataaaatatcttaactttcctcagagatccactgtcactggaaaaatgatagatgactatctaactcgtaaaaaaacctataatgatcatatagttaatctattattttgtgcaaatagatgggagtttgcatcttttatacaagaacaactagaacagggaattactttaatagttgatagatacgcattttctggagtagcgtatgccgccgctaaaggcgcgtcaatgactctcagtaagagttatgaatctggattgcctaaacccgacttagttatattcttggaatctggtagcaaagaaattaatagaaacgtcggtgaggaaatttatgaagatgttacattccaacaaaaggtattacaagaatataaaaaaatgattgaagaaggagatattcattggcaaattatttcttctgaattcgaggaagatgtaaagaaggagttgattaagaatatagttatagaggctatacacacggttactggaccagtggggcaactgtggatgtaatagtgaaattacattttttataaatagatgttagtacagtgttataaatggatgaagcatattactctggcaacttggaatcagtactcggatacgtgtccgatatgcataccgaactcgtatcaatatctcaattagttattgccaagatagaaactatagataatgatatattaaacaaggacattgtaaattttatcatgtgtagatcaaacttggataatccatttatctctttcctagatactgtatatactattatagatcaagagaactatcagactgagttgattaattcattagacgacaatgaaattatcgattgtatagttaataagtttatgagcttttataaggataacctagaaaatatagtagatgctatcatcactctaaaatatataatgaataatccagattttaaaactacgtatgcagaagtactcggttccagaatagcggatatagatattaaacaagtgatacgtgagaatatactacaattgtctaataatatccgcgaacgatatttgtgaaaatattaaaaaaaaatactttttttattaaatgacgtcttttcgtgaatttagaaaattatgctgtgctatatatcacgcatcaggatataaagaaaaatctaaattaattagagactttataacagatagggatgataaatatttgatcattaagctattgcttcccggattagacgatagaatttataacatgaacgataaacaaattataaaattatatagtataatatttaaacaatctcaggaagatatgctacaagatttaggatacggatatataggagacactattaggactttcttcaaagagaacacagaaatccgtccacgagataaaagcattttaactttagaagaagtggatagtttcttaactacgttatcatccgtaactaaagaatcgcatcaaataaaattattgactgatatcgcatccgtttgtacatgtaatgatttaaaatgtgtagtcatgcttattgataaagatctaaaaattaaagcgggtcctcggtacgtacttaacgctattagtcctcatgcctatgatgtgtttagaaaatctaataacttgaaagagataatagaaaatgcatctaaacaaaatctagactctatatctatttctgttatgactccaattaatcccatgttagcggaatcgtgtgattctgtcaataaggcgtttaaaaaatttccatcaggaatgtttgcggaagtcaaatacgatggtgaaagagtacaagttcataaaaataataacgagtttgccttctttagtagaaacatgaaaccagtactctctcataaagtggattatctcaaagaatacataccgaaagcatttaaaaaagctacgtctatcgtattggattctgaaattgttcttgtagacgaacataatgtaccgctcccgtttggaagtttaggaatacacaaaaagaaagaatataaaaactctaacatgtgtttgttcgtgtttgactgtttgtactttgatggattcgatatgacggacattccattgtacgaacgaagatcttttctcaaagatgttatggttgaaatacccaatagaatagtattctcagagttgacgaatattagtaacgagtctcagttaactgacgtattggatgatgcactaacgagaaaattagaaggattggtcttaaaagatattaatggagtatacgaaccgggaaagagaagatggttaaaaataaagcgagactatttgaacgagggttccatggcagattctgccgatttagtagtactaggtgcttactatggtaaaggagcaaagggtggtatcatggcagtctttctaatgggttgttacgacgatgaatccggtaaatggaagacggttaccaagtgttcaggacacgatgataatacgttaagggagttgcaagaccaattaaagatgattaaaattaacaaggatcccaaaaaaattccagagtggttagtagttaataaaatctatattcccgattttgtagtagaggatccgaaacaatctcagatatgggaaatttcaggagcagagtttacatcttccaagtcccataccgcaaatggaatatccattagatttcctagatttactaggataagagaggataaaacgtggaaagaatctactcatctaaacgatttagtaaacttgactaaatcttaatagttacatacaaactgaaaattaaaataacactatttagttggtggtcgccatggatggtgttattgtatactgtctaaacgcgctagtaaaacatggcgaggaaataaatcatataaaaaatgatttcatgattaaaccatgttgtgaaagagtttgtgaaaaagtcaagaacgttcacatcggcggacaatctaaaaacaatacagtgattgcagatttgccatatctggataatgctgtatcggatgtatgcaattcactgtataaaaagaatgtatcaagaatatccagatttgctaatttgataaagatagatgacgatgacaagactcctactggtgtatataattattttaaacctaaagatgccattcctgttattatatctataggaaaggatagagatgtctgtgaactattaatctcatcagacatatcgtgtgcatgcgtggagttaaattcatatcacgtagccattcttcccatggatgtttccttttttaccaaaggaaatgcatcattgattattctcctgtttgatttctctatcgatgcggcacctctcttaagaagtgtaaccgataataatgttattatatctagacaccagcgtctacatgacgagcttccgagttccaattggttcaagttttacataagtataaagtccgactattgttctatattatatatggttgttgatggatctgtgatgcatgcgatagctgataatagaactcacgcaattattagcaaaaatatattagacaatactacgattaacgatgagtgtagatgctgttattttgaaccacagattaggattcttgatagagatgagatgctcaatggatcatcgtgtgatatgaacagacattgtattatgatgaatttacctgatgtaggcgaatttggatctagtatgttggggaaatatgaacctgacatgattaagattgctctttcggtggctggtaatttaataagaaatcgagactacattcccgggagacgaggctatagctactacgtttacggtatagcctctagataatttttttaagcacgaaataaaaaacataattttaaaccaatctatttcatactattttgtgtgatcaccatggacataaagatagatattagtatttctggtgataaatttacggtgactactaggagggaaaatgaagaaagaaaaaaatatctacctctccaaaaagaaaaaactactgatgttatcaaacctgattatcttgagtacgatgacttgttagatagagatgagatgtttactattctagaggaatattttatgtacagaggtctattaggcctcagaataaaatatggacgactctttaacgaaattaaaaaattcgacaatgatgcggaagaacaattcggtactatagaagaactcaagcagaaacttagattaaattctgaagagggagcagataactttatagattatataaaggtacaaaaacaggatatcgtcaaacttactgtatacgattgcatatctatgataggattgtgtgcatgcgtggtagatgtttggagaaatgagaaactgttttctagatggaaatattgtttacgagcgattaaactgtttattgatgatcacatgcttgataagataaaatctatactgcagaatagactagtatatgtggaaatgtcatagaaagttaaaagttaatgagagcaaaaatatataaggttgtattccatatttgttattttttctgtaatagttaaaaaaatacattcgatggtctatctatcagattattatgtgttataaggtactttttctcataataaactagagtatgagtaagatagtgtttttcaaaacatataaatctaaaattgatggatgagatatacagctattaatttcgaaaatatattttaatctgataactttaaacatggatttttgatggtggtttaacgttttaaaaaaagattttgttattgtagtatatgataatattaaaagatggatataaagaatttgctgactgcatgtactattttttacattactacattggctacggcagatatacctacttcgtcaccaacggggcatgtgacgagggagaatatcttgataagaggcataatcaatgttgtaatcagtgtccacctggagaatttgccaaggttagatgtaatggtaacgataacacaaaatgtgaacgctgcccacctcatacatataccgcaatccccaattactctaatggatgtcatcaatgtagaaaatgcccaacaggatcatttgataaggtaaagtgtaccggaacacagaacagtaaatgttcgtgtcttcctggttggtattgcgctactgattcttcacagactgaagattgtcgagattgtataccaaaaaggagatgtccatgcggatactttggtggaatagatgaacaaggaaatcctatttgtaaatcgtgttgtgttggtgaatattgcgactacctacgtaattatagacttgatccatttcctccatgcaaactatctaaatgtaattaattatgattttgatgataatgttaccatacattatatcgctacttggttagtgtattattcagtatgaagacctattaataattacttatcttttgacgatcttgttataattataatataaaaacttatggcatagtaacttataattgctgacgcgataaattcgtaataatctgttttgttcaaaggaatctacaggcataaaaataaaaatataatttataatatactcttacaacgccatcatgaataacagcagtgaattgattgctgttattaatggatttagaaatagtggacgattttgtgatattagtatagttattaatgatgaaaggataaacgctcataaactcatcctatctggagcctccgaatatttttccattctgttttccaataattttatcgattctaatgaatacgaagttaatctaagtcatttagattatcaaagtgttaacgatttgatcgattatatttatgggatacctttgagcctaactaacgataacgtgaaatatattctttcaaccgctgattttttacaaattggatctgccattactgagtgtgaaaattacatacttaaaaatctttgttctagaaactgtatcgatttctacatatacgctgataaatataataacaagaaaatagaatcagcgtcgtttaacacaatattacaaaatattttgagactcatcaacgatgaaaactttaaatacttaacagaggaatcaatgataaaaattttaagcgatgatatgttaaatataaaaaatgaggatttcgccccactaattctcattaaatggttagagagtactcaacaaccatgcaccgtcgagttacttaaatgcctcagaatatcattgctttccccacaagttataaaatcactttatagtcatcgactggttagttcaatctacgaatgtataacattcttaaacaatatagcattcttggatgaatcatttcctagataccatagcatcgagttgatatctatcggtataagtaattcgcatgataagatttccataaactgctacaatcataaaaaaaatacatgggaaatgatatcttcacgtagatataggtgtagtttcgcagtggccgtcctggataatattatctatatgatgggtggatatgatcagtccccgtatagaagttcaaaggttatagcgtacaatacatgtacaaattcttggatatatgatataccagagctaaaatatcctcgttctaattgtgggggactggctgatgacgaatacatttattgtataggcggcatacgcgatcaggattcatcgttgacatctagtattgatagatggaagccatcaaaaccatattggcagaagtatgctaaaatgcgcgaaccaaaatgtgatatgggggttgcgatgttaaacggattaatatatgttataggtggaatcgttaaaggtgacacgtgtaccgacgcactagagagtttatcagaagatggatggatgaagcatcaacgtcttccaataaaaatgtccaatatgtcgacgattgttcatgatggcaagatttatatatctggaggttacaacaatagtagtgtagttaatgtaatatcgaatctagtccttagctataattcgatatatgatgaatggaccaaattatcatcattaaacattcctagaattaatcccgctctatggtcagcgcataataaattatatgtaggaggaggaatatctgatgatgttcgaactaatacatctgagacatacgacaaagaaaaagattgttggacattggataatggtcacgtgttaccacgcaattatataatgtataaatgcgaaccgattaaacataaatatccattggaaaaaacacagtacacgaatgattttctaaagtatttggaaagttttataggtagttgatagaacaaaatacataattttgtaaaaataaatcactttttatactaatatgacacgattaccaatacttttgttactaatatcattagtatactctacaccttctcctcagacatctaaaaaaataggtgatgatgcaactctatcatgtaatcgaaataatacaaatgactacgttgttatgagtgcttggtataaggagcccaattccattattcttttagctgctaaaagcgacgtcttgtattttgataattataccaaggataaaatatcttacgactctccatacgatgatctagttacaactatcacaattaaatcattgactgctagagatgccggtacttatgtatgtgcattctttatgacatcgcctacaaatgacactgataaagtagattatgaagaatactccacagagttgattgtaaatacagatagtgaatcgactatagacataatactatctggatctacacattcaccggaaactagttctgagaaacctgattatatagataattctaattgctcgtcggtattcgaaatcgcgactccggaaccaattactgataatgtagaagatcatacagacaccgtcacatacactagtgatagcattaatacagtaagtgcatcatctggagaatccacaacagacgagactccggaaccaattactgataaagaagaagatcatacagtcacagacactgtctcatacactacagtaagtacatcatctggaattgtcactactaaatcaaccaccgatgatgcggatctttatgatacgtacaatgatacagtaccaccaactactgtaggcggtagtacaacctctattagcaattataaaaccaaggactttgtagaaatatttggtattaccgcattaattatattgtcggccgtggcaatattctgtattacatattatatatataataaacgttcacgtaaatacaaaacagagaacaaagtctagatttttgacttacataaatgtctgggatagtaaaatctatcatattgagcgggccatctggtttaggaaagacagccatagccaaaagactatgggaatatatttggatttgtggtgtcccataccactagatttcctcgtcctatggaacgagaaggtgtcgattaccattacgttaacagagaggccatctggaagggaatagccgccggaaactttctagaacatactgagtttttaggaaatatttacggaacttctaaaacagctgtgaatacagcggctattaataatcgtatttgtgtgatggatctaaacatcgatggcgttagaagtcttaaaaatacgtacctaatgccttactcggtgtatataagacctacctctcttaaaatggttgagaccaagcttcgtcgtagaaacactgaagcggatgatgagattcatcgtcgtgtgatgttggcaaaaactgacatggatgaggcaggtgaagccggtctattcgacactattatcattgaagatgatgtgaatttagcatatagtaagttaattcagatactacaggaccgtattagaatgtattttaacactaattagagacttaagacttaaaacttgataattaataatataactcgtttttatatgtggctatttcaacgtctaatgtattagttaaatattaaaacttaccacgtaaaacttaaaatttaaaatgatatttcattgacagatagatcacacattatgaactttcaaggacttgtgttaactgacaattgcaaaaatcaatgggtcgttggaccattaataggaaaaggtggattcggtagtatttatactactaatgacaataattatgtagtaaaaatagagcccaaagctaacggatcattatttaccgaacaggcattttatactagagtacttaaaccatccgttatcgaagaatggaaaaaatctcacaatataaagcacgtaggtcttatcacgtgcaaggcatttggtctatacaaatccattaatgtggaatatcgattcttggtaattaatagattaggtgtagatctagatgcggtgatcagagccaataataatagattaccaaaaaggtcggtgatgttgatcggaatcgaaatcttaaataccatacaatttatgcacgagcaaggatattctcacggagatattaaagcgagtaatatagtcttagatcaaatagataagaataaattatatctagtggattacggattggtttctaaattcatgtctaatggcgaacatgttccatttataagaaatccaaataaaatggataacggtactctagaatttacacctatagattcgcataaaggatacgttgtatctagacgtggagatctagaaacacttggatattgtatgattagatggttgggaggtatcttaccatggactaagatatctgaaacaaagaattgtgcattagtaagtgccacaaaacagaaatatgttaacaatactgcgactttgttaatgaccagtttgcaatatgcacctagagaattgctgcaatatattaccatggtaaactctttgacatattttgaggaacccaattacgacaagtttcggcacatattaatgcagggtgtatattattaagtgtggtgtttggtcgataaaaattaaaaaataacttaatttattattgatctcgtgtgtacaaccgaaatcatggcgatgttttacgcacacgctctcggtgggtacgacgagaatcttcatgcctttcctggaatatcatcgactgttgccaatgatgtcaggaaatattctgttgtgtcagtttataataacaagtatgacattgtaaaagacaaatatatgtggtgttacagtcaggtgaacaagagatatattggagcactgctgcctatgtttgagtgcaatgaatatctacaaattggaaatccgatccatgatcaagaaggaaatcaaatctctatcatcacatatcgccacaaaaactactatgctctaagcggaatcgggtacgagagtctagacttgtgtttggaaggagtagggattcatcatcacgtacttgaaacaggaaacgctgtatatggaaaagttcaacatgattattctactatcaaagagaaggccaaagaaatgagtgcacttagtccaggacctatcatcgattaccacgtctggataggagattgtatctgtcaagttactgctgtggacgtacatggaaaggaaattatgaaaatgagattcaaaaagggtgcggtgcttccgatcccaaatctggtaaaagttaaacttggggagaatgatacagaaaatctttcttctactatatcggcgacaccatcgaggtaaccacctctctggaagacagcgtgaataatgtactcatgaaacgtttggaaactatacgccatatgtggtctgttgtatatgatcattttgatattgtgaatggtaaagaatgctgttatgtgcatacgcatttgtctaatcaaaatcttataccgagtactgtaaaaacaaatttgtacatgaagactatgggatcatgcattcaaatggattccatggaagctctagagtatcttagcgaactgaaggaatcaggtggatggagtcccagaccagaaatgcaggaatttgaatatccagatggagtggaagacactgaatcaattgagagattggtagaggagttcttcaatagatcagaacttcaggctggtgaatcagtcaaatttggtaattctattaatgttaaacatacatctgtttcagctaagcaactaagaacacgtatacggcagcagcttccttctatactctcatcttttaccaacacaaagggtggatatttgttcattggagttgataataatacacacaaagtatttggattcacggtgggttacgactacctcagactgatagagaatgatatagaaaagcatatcaaaagactttgtgttgtgtatttctgtgagaagaaagaggacatcaagtacgcgtgtcgattcatcaaggtatataaacctggggatgaggctacctcgacatacgtgtgcgctatcaaagtggaaagatgctgttgtgctgtgtttgcagattggccagaatcatggtatatggatactaatggtatcaagaagtattctccagatgaatgggtgtcacatataaaattttaattaatgtaactatagagaacaaataataaggttgtaatatcatatagacaataactaacaattaattagtaactgttatctcttttttaattaaccaactaactatatacctattaatacatcgtaattatagttcttaacatctattaatcattaattcgcttctttaattttttataaactaacattgttaattgaaaagggataacatgttacagaatataaattatatatggatttttttaaaaaggaaatacttgactggagtatatatttatctcttcattatatagcacgcgtgttttccaatttttccacatcccatataatacaggattataatctcgttcgaacatacgagaaagtggataaaacaatagttgattttttatctaggttgccaaatttattccatattttagaatatggggaaaatattctacatatttattctatggatgatgctaatacgaatattataattttttttctagatagagtattaaatattaataagaacgggtcatttatacacaatctcgggttatcatcatccattaatataaaagaatatgtatatcaattagttaataatgatcatccagataataggataagactaatgcttgaaaatggacgtagaacaagacattttttgtcctatatatcagatacagttaatatctatatatgtattttaataaatcatggattttatatagatgccgaagacagttacggttgtacattattacatagatgtatatatcactataagaaatcagaatcagaatcatacaatgaattaattaagatattgttaaataatggatcagatgtagataaaaaagatacgtacggaaacacaccttttatcctattatgtaaacacgatatcaacaacgtggaattgtttgagatatgtttagagaatgctaatatagactctgtagactttaatagatatacacctcttcattatgtctcatgtcgtaataaatatgattttgtaaagttattaatttctaaaggagcaaatgttaatgcgcgtaataaattcggaactactccattttattgtggaattatacacggtatctcgcttataaaactatatttggaatcagacacagagttagaaatagataatgaacatatagttcgtcatttaataatttttgatgctgttgaatctttagattatctattatccagaggagttattgatattaactatcgtactatatacaacgaaacatctatttacgacgctgtcagttataatgcgtataatacgttggtctatctattaaacaaaaatggtgattttgagacgattactactagtggatgtacatgtatttcggaagcagtcgcaaacaacaacaaaataataatggaagtactattgtctaaacgaccatctttgaaaattatgatacagtctatgatagcaattactaaacataaacagcataatgcagatttattgaaaatgtgtataaaatatactgcgtgtatgaccgattatgatactcttatagatgtacagtcgctacagcaatataaatggtatattttaagatgtttcgatgaaatagatatcatgaagagatgttatataaaaaataaaactgtattccaattagttttttgtatcaaagacattaatactttaatgagatacggtaaacatccttctttcgtgaaatgcactagtctcgacgtatacggaagtcgtgtacgtaatatcatagcatctattagatatcgtcagagattaattagtctattatccaagaagctggatcctggagataaatggtcgtgttttcctaacgaaataaaatataaaatattggaaaactttaacgataacgaactatccacatatctaaaaatcttataaacattattaaaatataaaatctaagtaggataaaatcacactacatcattgtttccttttagtgctcgacagtgtatactatttttaacgctcataaataaaaatgaaaacgatttccgttgttacgttgttatgcgtactacctgctgttgtttattcaacatgtactgtacccactatgaataacgctaaattaacgtctaccgaaacatcgtttaatgataaccagaaagttacgtttacatgtgatcagggatatcattctttggatccaaatgctgtctgtgaaacagataaatggaaatacgaaaatccatgcaaaaaaatgtgcacagtttctgattatgtctctgaactatataataaaccgctatacgaagtgaattccaccatgacactaagttgcaacggcgaaacaaaatattttcgttgcgaagaaaaaaatggaaatacttcttggaatgatactgttacgtgtcctaatgcggaatgtcaacctcttcaattagaacacggatcgtgtcaaccagttaaagaaaaatactcatttggggaatatatgactatcaactgtgatgttggatatgaggttattggtgcttcgtacataagttgtacagctaattcttggaatgttattccatcatgtcaacaaaaatgtgatatgccgtctctatctaacggattaatttccggatctacattttctatcggtggcgttatacatcttagttgtaaaagtggttttacactaacggggtctccatcatccacatgtatcgacggtaaatggaatcccgtactcccaacatgtgtacgatctaacgaaaaatttgatccagtggatgatggtcccgacgatgagacagatttgagcaaactctcgaaagacgttgtacaatatgaacaagaaatagaatcgttagaagcaacttatcatataatcatagtggcgttgacaattatgggcgtcatatttttaatctccgttatagtattagtttgttcctgtgacaaaaataatgaccaatataagttccataaattgctaccgtgaatataaatccgttaaaataattaataatttaataacgaacaagtatcaaaagattaaagacttatagctagaatcaattgagatgtcttcttcagtggatgttgatatctacgatgccgttagagcatttttactcaggcactattataacaagagatttattgtgtatggaagaagtaacgccatattacataatatatacaggctatttacaagatgcgccgttataccgttcgatgatatagtacgtactatgccaaatgaatcacgtgttaaacaatgggtgatggatacacttaatggtataatgatgaatgaacgcgatgtttctgtaagcgttggcaccggaatactattcatggaaatgtttttcgattacaataaaaatagtatcaacaatcaactaatgtatgatataattaatagcgtatctataattctagctaatgagagatatagaagcgcttttaacgacgatggtatatacatccgtagaaatatgattaacaagttgtacggatacgcatctctaactactattggcacgatcgctggaggtgtttgttattatctgttgatgcatctagttagtttgtataaataattatttcaatatactagttaaaattttaagattttaaatgtataaaaaactaataacgtttttatttgtaataggtgcattagcatcctattcgaataatgagtacactccgtttaataaactgagtgtaaaactctatatagatggagtagataatatagaaaattcatatactgatgataataatgaattggtgttaaattttaaagagtacacaatttctattattacagagtcatgcgacgtcggatttgattccatagatatagatgttataaacgactataaaattattgatatgtataccattgactcgtctactattcaacgcagaggtcacacgtgtagaatatctaccaaattatcatgccattatgataagtacccttatattcacaaatatgatggtgatgagcgacaatattctattactgcagagggaaaatgctataaaggaataaaatatgaaataagtatgatcaacgatgatactctattgagaaaacatactcttaaaattggatctacttatatatttgatcgtcatggacatagtaatacatattattcaaaatatgatttttaaaaatttaaaatatattatcacttcagtgacagtagtcaaataacaaacaacaccatgagatatattataattctcgcagttttgttcattaatagtatacacgctaaaataactagttataagtttgaatccgtcaattttgattccaaaattgaatggactggggatggtctatacaatatatcccttaaaaattatggcatcaagacgtggcaaacaatgtatacaaatgtaccagaaggaacatacgacatatccgcatttccaaagaatgatttcgtatctttctgggttaaatttgaacaaggcgattataaagtggaagagtattgtacgggactatgcgtcgaagtaaaaattggaccaccgactgtaacattgactgaatacgacgaccatatcaatttgtacatcgagcatccgtatgctactagaggtagcaaaaagattcctatttacaaacgcggtgacatgtgtgatatctacttgttgtatacggctaacttcacattcggagattctaaagaaccagtaccatatgatatcgatgactacgattgcacgtctacaggttgcagcatagactttgtcacaacagaaaaagtgtgcgtgacagcacagggagccacagaagggtttctcgaaaaaattactccatggagttcgaaagtatgtctgacacctaaaaagagtgtatatacatgcgcaattagatccaaagaagatgttcccaatttcaaggacaaaatggccagagttatcaagagaaaatttaatacacagtctcaatcttatttaactaaatttctcggtagcacatcaaatgatgttaccacttttcttagcatgcttaacttgactaaatattcataactaatttttattaatgatacaaaaacgaaataaaactgcatattatacactggttaacgcccttataggctctaaccattttcaagatgaggtccctgattatagtccttctgttcccctctatcatctactccatgtctattagacgatgtgagaagactgaagaggaaacatggggattgaaaatagggttgtgtataattgccaaagatttctatcccgaaagaactgattgcagtgttcatctcccaactgcaagtgaaggattgataactgaaggcaatggattcagggatatacgaaacaccgataaattataaaaaaagcaatgtgtccgctgtttccgttaataatactattttcgtaactggcggattattcataaataactctaatagcacgatcgtggttaacaatatggaaaaacttgacatttataaagacaaacaatggtcgattatagaaatgcctatggctagggtatatcacggcatcgactcgacatttggaatgttatattttgccggaggtctatccgttaccgaacaatatggtaatttagagaaaaacaacgagatatcttgttacaatcctagaacgaataagtggtttgatatttcatatactatttataagatatccatatcatcattgtgtaaactaaataacgtcttctatgtatttagtaaggacattggatatgtggaaaagtatgatggtgcatggaagttagtacatgatcgtctccccgctataaaggcattatcaacttctccttattgattgaaaatgaaaatataaatagtttttatgtatagcagtattaccctatagttttattgcttactactaacatggatacagatgttacaaatgtagaagatatcataaatgaaatagatagagagaaagaagaaatactaaaaaatgtagaaattgaaaataataaaaacattaacaagaatcatcccaatgaatatattagagaagcactcgttattaataccagtagtaatagtgattccattgataaagaagttatagaatgtatcagtcacgatgtaggaatatagatcatatctactaatttttataatcgatacaaaacataaaaaacaactcgttattacatagcaggcatggaatccttcaagtattgttttgataacgatggcaagaaatggattatcggaaatactttatattctggtaattcaatactctataaggtcagaaaaaatttcactagttcgttctacaattacgtaatgaagatagatcacaaatcacacaagccattgttgtctgaaatacgattctatatatctgtattggatcctttgactatcgacaactggacacgggaacgtggtataaagtatttggctattccagatctgtatggaattggagaaaccgatgattatatgttcttcgttataaagaattcgggaagagtattcgccccaaaggatactgaatcagtcttcgaagcatgcgtcactatgataaacacgttagagtttatacactctcgaggatttacccatggaaaaatagaaccgaggaatatactgattagaaataaacgtctttcactaattgactattctagaactaacaaactatacaagagtggaaactcacatatagattacaacgaggacatgataacttcaggaaatatcaattatatgtgtgtagacaatcatcttggagcaacagtttcaagacgaggagatttagaaatgttgggatattgcatgatagaatggttcggtggcaaacttccatggaaaaacgaaagtagtataaaagtaataaaacaaaaaaaagaatataaaaaatttatagctactttctttgaggactgttttcctgaaggaaatgaacctctggaattagttagatatatagaattagtatacacgttagattattctcaaactcctaattatgacagactacgtaaactgtttatacaagattgaaattatattcttttttttatagagtgtggtagtgttacggatatctaatattaatattagactatctctatcgcgctacacgaccaatatcgattactatggatatcttctatgaaaggagagaatgtatttatttctccagcgtcaatctcgtcagtattgacaatactgtattatggagctaatggatccactgctgaacagctatcaaaatatgtagaaacggaggagaacacggataaggttagcgctcagaatatctcattcaaatccatgaataaagtatatgggcgatattctgccgtgtttaaagattcctttttgagaaaaattggcgataagtttcaaactgttgacttcactgattgtcgcactatagatgcaatcaacaagtgtgtagatatctttactgaggggaaaatcaatccactattggatgaaccattgtctcctagcaattagtgccgtatactttaaagcaaaatggttgacgccattcgaaaaggaatttaccagtgattatcccttttacgtatctccgacggaaatggtagacgtaagtatgatgtctatgtacggcaaggcatttaatcacgcatctgtaaaagaatcattcggcaacttttcaatcatagaactgccatatgttggagatactagtatgatggtcattcttccagacaagattgatggattagaatccatagaacaaaatctaacagatacaaattttaagaaatggtgtgactttatggatgctatgtttatagatgttcacattcccaagtttaaggtaacaggctcgtataatctggtggatactctagtaaagtcaggactgacagaggtgttcggttcaactggagattatagcaatatgtgtaatttagatgtgagtgtcgacgctatgatccacaaaacgtatatagatgtcaatgaagagtatacagaagcagctgcagcaacttctgtactagtggcagactgtgcatcaacaattacaaatgagttctgtgcagatcatccgttcatctatgtgattaggcatgttgatggaaaaattcttttcgttggtagatattgctctccgacaactaattgttaaccattttttttaaaaaaaatagaaaaaacatgtggtattagtgcaggtcgttgttcttccaattgcaattggtaagatgacggccaactttagtacccacgtcttttcaccacagcactgtggatgtgacagactgaccagtattgatgacgtcaaacaatgtttgactgaatatatttattggtcgtcctatgcataccgcaacaggcaatgcgctggacaattgtattccacactcctctcttttagagatgatgcggaattagtgttcatcgacattcgcgagctggtaaaaaatatgccgtgggatgatgtcaaagattgtacagaaatcatccgttgttatataccggatgagcaaaaaaccatcagagagatttcggccatcatcggactttgtgcatatgctgctacttactggggaggtgaagaccatcccactagtaacagtctgaacgcattgtttgtgatgcttgagatgctaaattacgtggattataacatcatattccggcgtatgaattgatgagttgtacatcttgacattttctttcttctcttctccctttcttctcttctcccttcctccctcttctccctttcccagaaacaaacttttttacccactataaaataaaatgagtatactacctgttatatttctttctatatttttttattcttcattcgttcagacttttaacgcgtctgaatgtatcgacaaagggcaatattttgcatcattcatggagttagaaaacgagccagtaatcttaccatgtcctcaaataaatacgctatcatccggatataatatattagatattttatgggaaaaacgaggagcggataatgatagaattataccgatagataatggtagcaatatgctaattctgaacccgacacaatcagactctggtatttatatatgcattaccacgaacgaaacctactgtgacatgatgtcgttaaatttgacaatcgtgtctgtctcagaatcaaatatagattttatctcgtatccacaaatagtaaatgagagatctactggcgaaatggtatgtcccaatattaatgcatttattgctagtaacgtaaacgcagatattatatggagcggacatcgacgccttagaaataagagacttaaacaacggacacctggaattattaccatagaagatgttagaaaaaatgatgctggttattatacatgtgttttagaatatatatacggtggcaaaacatataacgtaaccagaattgtaaaattagaggtacgggataaaataataccttctactatgcaattaccagatggcattgtaacttcaataggtagtaatttgactattgcatcgttgagacctcccacaacggatgcagacgtcttttggataagtaatggtatgtattacgaagaagatgatggggacggaaacggtagaataagtgtagcaaataaaatctatatgaccgataagagacgtgttattacatcccggttaaacattaatcctgtcaaggaagaagatgctacaacgtttacgtgtatggcgtttactattcctagcatcagcaaaacagttactgttagtataacgtgaatgtatgttgttacatttccatgtcaattgagtttataagaatttttatacattatcttccaacaaacaattgacgaacgtattgctatgattaactcccacgatactatgcatattattaatcattaacttgcagactatacctagtgctattttgacatactcatgttcttgtgtaattgcggtatctatattattaaagtacgtaaatctagctatagttttattatttaattttagataatataccgtctccttatttttaaaaattgccacatcctttattaaatcatgaatgggaatttctatgtcatcgttagtatattgtgaacaacaagagcagatatctataggaaagggtggaatgcgatacattgatctatgtagttttaaaacacacgcgaactttgaagaatttatataaatcattccatcgatacatccttctatgttgagatgtatatatccaggaattcgtttattaatatcgggaaatgtataaactaaaacattgcccgaaagcggtgcctctatctgcgttatatccgttcttaacttacaaaatgtaaccaatacctttgcatgacttgttttgttcggcaacgttagtttaaacttgacgaatggattaattacaatagcatgatccgcgcatctattaagtttttttactttaacgcccttgtatgtttttacagagactttatctaaatttctagtacttgtatgtgttataaatataacgggatatagaaccgaatcacctaccttagatacccaattacattttatcagatccagataataaacaaattttgtcgccctaactaattctatattgttatatattttacaattggttatgatatcatgtaataacttggagtctaacgcgcatcgtcgtacgtttatacaattgtgatttagtgtagtatatctacacatgtatttttccgcactatagtattctggactagtgataaaactatcgttatatctgtcttcaatgaactcatcgagatattgctctctgtcatattcatacacctgcataaactttctagacatcttacaatccgtgttattttaggatcatatttacatatttacgggtatatcaaagatgttagattagttaatgggaatcgtctataataatgaatattaaacaattatatgaggacttttaccacaaagcatcataaaaatgagtcgtcgtctgatttatgttttaaatatcaaccgcgaatcaactcataaaatacaagagaatgaaatatatacatattttagtcattgcaatatagaccatacttctacagaacttgattttgtagttaaaaactatgatctaaacagacgacaacctgtaactgggtatactgcactacactgctatttgtataataattactttacaaacgatgtactgaagatattattaaatcatggagtggatgtaacgatgaaaaccagtagcggacgtatgcctgtttatatattgcttactagatgttgtaatatttcacatgatgtagtgatagatatgatagacaaagataaaaaccacttatcgcatagagactattccaacctactactagagtatataaaatctcgttacatgttattaaaggaagaggatatcgatgagaacatagtatccactttattagataagggaatcgatcctaactttaaacaagacggatatacagcgttacattattatttgtgtctcgcacacgtttataaaccaggtgagtgtagaaaaccgataacgataaaaaaggccaagcgaattatttctttgtttatacaacatggagctaatctaaacgcgttagataattgtggtaatacaccattccatttgtatcttagtattgaaatgtgtaataatattcatatgactaaaatgctgttgacttttaatccgaatttcaaaatatgtaataatcatggattaacgcctatactatgttatataacttccgactacatacaacacgatattcttgttatgttaatacatcactatgaaacaaatgttggagaaatgccgatagatgagcgtcgtataatcgtattcgagtttatcaaaacatattctacacgtccggcagattcgataacttatttgatgaataggtttaaaaatataaatatttatacccgctatgaaggaaagacattattacacgtagcatgtgaatataataatacacacgtaatagattatcttatacgtatcaacggagatataaatgcgttaaccgacaataacaaacacgctatccaactcattatagataacaaagaaaattccccatataccattaattgtttactgtatatacttagatatattgtagataagaatgtgataagatcgttggtggatcaacttccatctctacctatctttcgtcgcttatcatactagtcatatcctaaatgttgatcatattccaccaaatgattgtgaaagagattgagattaaatcgtctaacaaacaattagtttttatgacattaacatataataaataaattaatcattattgacttaacgatgacgaaagttatcatcatcttaggattcttgattattaatacaaattcattgtctatgaaatgtgaacaaggtgtctcatattataattcacaagaattaaagtgttgtaaactatgtaagccaggaacatattcagatcatcgatgtgataaatacagcgataccatttgtggacattgtccgagtgacacattcacgtcaatatataatcgttctccttggtgtcatagttgtagaggtccatgtggtactaatcgagtagaggtcacaccttgtacacctaccacaaatagaatctgtcattgtgactcgaatagttattgtctccttaaagcttttgatggtaactgtgttacatgtgctcctaaaacaaaatgtggtcgtgggtatggaaagaaaggagaagatgaaatgggtaataccatttgtaagaaatgtcggaagggtacttattcagatattgtatctgactctgatcaatgtaaaccaatgacaagataagacttactcgcatctactggatagacataaaatatcctcctcgtaataatgaaatataatatacactaattattaatatcaataacaatcgagtattaatatataggtcatttttaaatcccttttgggttccgtcccaaacggcgtttcggtctgcgtcgccgccatggccatgccgagcctctccgcgtgctcctccatcgaggacgacttcaactatggcagctcggtggcgtctgccagcgtgcacatacgaatggcatttctaagaaaagtctacggtatcctttgtctacaatttcttttaacaacggcaacaactgcagtatttttatactttgactgcatgcggacatttatacaagggagtcctgttctaatattggcatcaatgttcggatctataggcttgattttcgcattgactttacacagacataaacatcccctgaatctgtacctgctttgtggatttacactgtcggaatctctaacgctggcctctgttgttactttctatgatgtgcatgtcgttatgcaagctttcatgctgactactgcagcgtttcttgctctgactacatatactctacaatcaaagagagatttcagtaaacttggagcaggattgtttgctgctttgtggattttaattttgtcaggactcttggggatatttgtgcaaaatgagacagtgaagctggtcctgtctgcttttggggcccttgtattctgtggattcattatctatgacacgcactcactaatacataagctctcgcctgaagagtatgtgttagcctctatcaatctctacttggatatcatcaatctgttcttgcatctgttgcagcttttggaagtatctaataagaaataaagtttaaaatagaattaataaaaacatataggtcattttttaaacatggattggaaaccaaggtagttagttaatacacacaagatatatttttttcacatcatccacccatgggtaacaccaaggttgttagttaataatatacaagatattttttctcactctgatccatgtaaaccaaggacgagataagacactctcattcctcatctacaaccccattaaaaaatggaaattaaagccctctattagcatagacggctacaggtctaccatcaggttaaccttcgtctaccttcacaatggcctttccttgtgcccagttcagaccctgtcattgccacgctactaaggactccctgaataccgtggccgacgtcagacattgtctgactgaatacatcctgtgggtttctcatagatggacccatagagaaagcgcagggtctctctacaggcttctcatctctttcagaactgatgcaacggagctctttggtggtgagttgaaggattcacttccgtgggacaattgcgtggagatcattaaatgtttcatcagaaatgactccatgaaaaccgccgaagaacttcgtgcaatcattggactttgtactcaatcagctatcgtctctggaagagtcttcaacgataagtatatcgacatactacttatgctgcgaaagattctgaacgagaacgactatctcaccctcttggatcatatccgcactgctaaatactaaatctccttcatgctctctcactacactttttatcatcttatgaggaatgattgccttcgtgaaataggaataattagcaccagaatagctatggattattgtggtagagagtgcactattctatgtcgtctactggatgaagatgtgacgtacaaaaaaataaaaccagagattgaaacgtgtcacaacttatcaaaacatatagatagacgaggaaacaatgcgctacattgttacgtcttcaataaatgcgatacagacattaagattgttcggctgttactctctcgcggagtcgagagactttgtagaaacaacgaaggattaactccgctaggagcatacagtaagcatagatacgtcaaatctcagattgtgcatctactgatatccagctattcgaattcctctaacgaactcaagtcgaatataaatgatttcgatctgtattcggataatatcgacttacgtctgctaaaatacctaattgtggataaacggatacgtccgtccaagaatacgaattatgcaatcaatggtctcggattggtggatatatacgtaacgacgcctaatccgagaccagaagtattgctatggcttcttaaatcagaatgttacagcaccggttacgtatttcgtacctgtatgtacgacagtgatatgtgtaagaactctcttcattactatatatcgtctcatagagaatctcaatctctatccaaggatgtaattaaatgtttgatcgataacaatgtttccatccatggcagagacgaaggaggatctttacccatccaatactactggtcttgctcaaccatagatatagagattgttaaattattaataaaggatgtggacacgtgtagagtatacgacgtcagccctatattagaggcgtattatctaaacaagcgatttagagtaaccccatataatgtagacatggaaatcgttaatcttcttattgagagacgtcatactcttgtcgacgtaatgcgtagtattacttcgtacgattccagagaatataaccactacatcatcgataacattctaaagagatttagacaacaggatgtacaagccatgttgataaactacttacattacggcgatatggtaagtatacctatcattcaatgcatgttggataacggagcaaccatggataagacgacggacaacaactatcctctacacgactactttgttaataataatctcgtcgatgtaaacgtcgtaaggtttatcgtggaaaatatggacacgcggctgtaaatcacatatctaacaatggccgtctatgtatgtacggtctgatattatcgagatttaataattgcgggtatcactgttatgaaaccatactgatagatgtatttgatatactaagcaagtacatggatgatatagatatgatcgataactctactatattacgcggtcgatgtcaataatatacaatttgcaaagcggttattggaatatggagcgagtgtcacgctcgataatcaatacggccatccagaaaagcagttaccaaagagaaaacaaaacgaggatagttgatttattacttagctaccatcccactctagagactatgattgacgcatttaatagagatatacgctatctatatcctgaaccattattcgcctgtatcagatacgccttaatcctagatgatgattttccttctaaagtaaagtatgatatctccggtcgtcataaggaactaaagcgctatagagtagacattaatagaatgaagaatgtctacatatcaggcgtctccatgtttgatatattctttaaacgaagcaaacgccacaaattgagatacgcaaagaatccgacatcaaatggtacaaaaaagaactaacgtccatcattacagaaactgtaaagaacaatgagaggatcgactccatagtggacaacattaatacagacgataacttgatttcgaaattacccatggagatactttattactccattaaataatttatcatggagcgataatgtcctgtttcatttgtttccatgacatattacaaaatcgattccgtccaagatgataaaaacatttaccggcatcataaacacggagtttattttatatgtctcgcataaacattactaaaaaaatatattgttctgtttttctttcacatctttaattatgaaaaagtaaatcattatgagatggacgagattgtacgcatcgttcgcgacagtatgtggtacatacctaacgtatttatggacgacggtaagaatgaaggtcacgtttctgtcaacaatgtctgtcatatgtattttacgttctttgatgtggatacatcgtctcatctgtttaagctagttattaaacactgcgatctgaataaacgaggtaactctccattacattgctatacgatgaatacacgatttaatccatctgtattaaagatattgttacaccacggcatgcgtaactttgatagcaaggatgaccactatcaatcgataacaagatctttgatatactaacggacaccattgatgactttagtaaatcatccgatctattgctgtgttatcttagatataaattcaatgggagcttaaactattacgttctgtacaaaggatccgaccctaattgcgccgacgaggatgaactcacttctcttcattactactgtaaacacatatccacgttctacgaaagcaattattacaagttaagtcacactaagatgcgagccgagaagcgattcatctacgcgataatagattatggagcaaacattaacgcggttacacacttaccttcaacagtataccaaacatagtcctcgtgtggtgtatgctcttttatctcgaggagccgatacgaggatacgtaataatcttgattgtacacccatcatggaacgattgtgcaacaggtcatattctcataatgttactcaattggcacgaacaaaaggaagaaggacaacatctactttatctattcataaaacataatcaaggatacactctcaatatactacggtatctattagataggttcgacattcagaaagacgaatactataataccgcctttcaaaattgtaacaacaatgttgcctcatacatcggatacgacatcaaccttccgactaaagacggtattcgacttggtgtttgaaaacagaaacatcatatacaaggcggatgttgtgaatgacatcatccaccacagactgaaagtatctctacctatgattaaatcgttgttctacaagatgtctctccctacgacgattactacgtaaaaaagatactagcctactgcctattaagggacgagtcattcgcggaactacatagtaaattctgtttaaacgaggactataaaagtgtatttatgaaaaatatatcattcgataagatagattccatcatcgtgacataagtcgcctcaaagagattcgaatctccgacaccgacctgtatacggtatcacagctatcttaaagccatacattcagacagtcacatttcatttcccatgtacgacgatctcatagaacagtgccatctatcgatggagcgtaaaagtaaactcgtcgacaaagcactcaataaattagagtctaccatcggtcaatctagactatcgtatttgcctccggaaattatgcgcaatatcatctaaacagtatgttgtacggaaagaaccattacaaatattatccatgatagaaagaaaatatctatatgattggagaagtaggaaacaggaacaagacaacgattactacattattaaatcatgaagtccgtattatactcgtatatattgtttctctcatgtataataataaacggaagagatatagcaccgcatgcaccatccgatggaaagtgtaaagacaacgaatacaaacgccataatttgtgtccgggaacatacgcttccagattatgcgatagcaagactaacacacgatgtacgccgtgtggttcgggtaccttcacatctcgcaataatcatttacccgcttgtctaagttgtaacggaagacgcgatcgtgtaacacgactcacaatagaatctgtgaatgctctcccggatattattgtcttctcaaaggatcatccggatgcaaggcatgtgtttcccaaacaaaatgtggaataggatacggagtatccggagacgtcatctgttctccgtgtggtctcggaacatattctcacaccgtctcttccgcagataaatgcgaacccgtacccagaaatacgtttaactatatcgatgtggaaattaacctgtatccagttaacgacacgtcgtgtactcggacgaccactaccggtctcagcgaatccatctcaacgtcggaactaactattactatgaatcataaagactgtaatcccgtctttcgtgatggatacttctccgttcttaataaggtagcaacttcaggattctttacaggagaaaggtgtgcactctgaatttcgagattaaatgcaataacaaagattcttcctccaaacagttaacgaaagcaaagaatgatactatcatgccgcattcggagacagtaactctagtgggcgacatctatatactatatagtaataccaatactcaagactacgaaactgatacaatctcttatcatgtgggtaatgttctcgatgtcgatagccatatgcccggtagttgcgatatacataaactgatcactaattccaaacccacccactttttatagtaagtttttcacccataaataataaatacaataattaatttctcgtaaaagtagaaaatatattctaatttattgcacggtaaggaagtagaatcataaagaacagtactcaatcaatagcaattatgaaacaatatatcgtcctggcatgcatgtgcctggcggcagctgctatgcctgccagtcttcagcaatcatcctcatcctcctcctcgtgtacggaagaagaaaacaaacatcatatgggaatcgatgttattatcaaagtcacaaagcaagaccaaacaccgaccaatgataagatttgccaatccgtaacggaaattacagagtccgagtcagatccagatcccgaggtggaatcagaagatgattccacatcagtcgaggatgtagatcctcctaccacttattactccatcatcggtggaggtctgagaatgaactttggattcaccaaatgtcctcagattaaatccatctcagaatccgctgatggaaacacagtgaatgctagattgtccagcgtgtccccaggacaaggtaaggactctcccgcgatcactcatgaagaagctcttgctatgatcaaagactgtgaagtgtctatcgacatcagatgtagcgaagaagagaaagacagcgacatcaagacccatccagtactcgggtctaacatctctcataagaaagtgagttacgaagatatcatcggttcaacgatcgtcgatacaaaatgcgtcaagaatctagagtttagcgttcgtatcggagacatgtgcaaggaatcatctgaacttgaggtcaaggatggattcaagtatgtcgacggatcggcatctgaaggtgcaaccgatgatacttcactcatcgattcaacaaaactcaaagcgtgtgtctgaatcgataactctattcatctgaaattggatgagtagggttaatcgaacgattcaggcacaccacgaattaaaaaagtgtaccggacactatattccggtttgcaaaacaaaaatgttcttaactacattcacaaaaagttacctctcgcgacttcttctttttctgtctcaatagtgtgatacgattatgacactattcctattcctattcctatttcctttcagagtatcacaaaaatattaaacctctttctgatggtctcataaaaaaagttttacaaaaatatttttattctctttctctctttgatggtctcataaaaaaagttttacaaaaatatttttattctctttctctctttgatggtctcataaaaaaagttttacaaaaatatttttattctctttctctctttgatggtctcataaaaaaagttttacaaaaatatttttattctctttctctctttgatggtctcataaaaaaagttttacaaaaatatttttattctctttctctctttgatggtctcataaaaaaagttttacaaaaatatttttattctctttctctctttgatggtctcataaaaaaagttttacaaaaatatttttattctctttctctctttgatggtctcataaaaaaagttttacaaaaatatttttattctctttctctctttgatggtctcataaaaaaagttttacaaaaatatttttattctctttctctctttgatggtctcataaaaaaagttttacaaaaatatttttattctctttctctctttgatggtctcataaaaaaagttttacaaaaatatttttattctctttctctctttgatggtctcataaaaaaagttttacaaaaatatttttattctctttctctctttgatggtctcataaaaaaagttttacaaaaatatttttattctctttctctctttgatggtctcataaaaaaagttttacaaaaatatttttattctctttctctctttgatggtctcataaaaaaagttttacaaaaatatttttattctctttctctctttgatggtctcataaaaaaagttttacaaaaatatttttattctctttctctctttgatggtctcataaaaaaagttttacaaaaatatttttattctctttctctctttgatggtctcataaaaaaagttttacaaaaatatttttattctctttctctctttgatggtctcataaaaaaagttttaatcg

SEQ ID NO: 9 - DNA, 188082 bp, Vaccinia virus
  LIVP 6.1.1
tcaaagagagaaagagaataaaaatatttttgtaaaactttttttatgagaccatcaaagagagaaagagaataaaaatatttttgtaaaactttttttatgagaccatcaaagagagaaagagaataaaaatatttttgtaaaactttttttatgagaccatcaaagagagaaagagaataaaaatatttttgtaaaactttttttatgagaccatcaaagagagaaagagaataaaaatatttttgtaaaactttttttatgagaccatcaaagagagaaagagaataaaaatatttttgtaaaactttttttatgagaccatcaaagagagaaagagaataaaaatatttttgtaaaactttttttatgagaccatcaaagagagaaagagaataaaaatatttttgtaaaactttttttatgagaccatcaaagagagaaagagaataaaaatatttttgtaaaactttttttatgagaccatcaaagagagaaagagaataaaaatatttttgtaaaactttttttatgagaccatcaaagagagaaagagaataaaaatatttttgtaaaactttttttatgagaccatcaaagagagaaagagaataaaaatatttttgtaaaactttttttatgagaccatcagaaagaggtttaatatttttgtgatactctgaaaggaaataggaataggaataggaatagtgtcataatcgtatcacactattgagacagaaaaagaagaagtcgcgagaggtaactttttgtgaatgtagttaagaacatttttgttttgcaaaccggaatatagtgtccggtacacttttttaattcgtggtgtgcctgaatcgttcgattaaccctactcatccaatttcagatgaatagagttatcgattcagacacacgctttgagttttgttgaatcgatgagtgaagtatcatcggttgcaccttcagatgccgatccgtcgacatacttgaatccatccttgacctcaagttcagatgattccttgcacatgtctccgatacgaacgctaaactctagattcttgacgcattttgtatcgacgatcgttgaaccgatgatatcttcgtaactcactttcttatgagagatgttagacccgagtactggatgggtcttgatgtcgctgtctttctcttcttcgctacatctgatgtcgatagacacttcacagtctttgatcatagcaagagcttcttcatgagtgatcgcgggagagtccttaccttgtcctggggacacgctggacaatctagcattcactgtgtttccatcagcggattctgagatggatttaatctgaggacatttggtgaatccaaagttcattctcagacctccaccgatgatggagtaataagtggtaggaggatctacatcctcgactgatgtggaatcatcttctgattccacctcgggatctggatctgactcggactctgtaatttccgttacggattggcaaatcttatcattggtcggtgtttggtcttgctttgtgactttgataataacatcgattcccatatgatgtttgttttcttcttccgtacacgaggaggaggatgaggatgattgctgaagactggcaggcatagcagctgccgccaggcacatgcatgccaggacgatatattgtttcataattgctattgattgagtactgttctttatgattctacttccttaccgtgcaataaattagaatatattttctacttttacgagaaattaattattgtatttattatttatgggtgaaaaacttactataaaaagtgggtgggtttggaattagtgatcagtttatgtatatcgcaactaccgggcatatggctatcgacatcgagaacattacccacatgataagagattgtatcagtttcgtagtcttgagtattggtattactatatagtatatagatgtcgcccactagagttactgtctccgaatgcggcatgatagtatcattctttgctttcgttaactgtttggaggaagaatctttgttattgcatttaatctcgaaattcagagtgcacacctttctcctgtaaagaaacctgaagtcgctaccttattaagaacggagaagtatccatcacgaaagacgggattacagtctttatgattcatagtaatagttagttccgacgttgagatggattcgctgagaccggtagtggtcgtccgagtacacgacgtgtcgttaactggatacaggttaatttccacatcgatatagttaaacgtatttctgggtacgggttcgcatttatctgcggaagagacggtgtgagaatatgttccgagaccacacggagaacagatgacgtctccggatactccgtatcctattccacattttgtttgggaaacacatgccttgcatccggatgatcctttgagaagacaataatatccgggagagcattcacagattctattgtgagtcgtgttacacgatcgcgtcttccgttacaacttagacaagcgggtaaatgattattgcgagatgtgaaggtacccgaaccacacggcgtacattgtgtgttagtcttgctatcgcataatctggaagcgtatgttcccggacacaaattatggcgtttgtattcgttgtctttacactttccatcggatggtgcatgcggtgctatatctcttccgtttattattatacatgagagaaacaatatatacgagtataatacggacttcatgatttaataatgtagtaatcgttgtcttgttcctgtttcctacttctccaatcatatagatattttctttctatcatggataatatttgtaatggttctttccgtacaacatactgtttagatgatattgcgcataatttccggaggcaaatacgatagtctagattgaccgatggtagactctaatttattgagtgctttgtcgacgagtttacttttacgctccatcgatagatggcactgttctatgagatcgtcgtacatgggaaatgaaatgtgactgtctgaatgtatggctttaagatagctgtgataccgtatacaggtcggtgtcggagattcgaatctctttgaggcgacttatgtcacgatgatggaatctatcttatcgaatgatatatttttcataaatacacttttatagtcctcgtttaaacagaatttactatgtagttccgcgaatgactcgtcccttaataggcagtaggctagtatcttttttacgtagtaatcgtcgtagggagagacatcttgtagaacaacgatttaatcataggtagagatactttcagtctgtggtggatgatgtcattcacaacatccgccttgtatatgatgtttctgttttcaaacaccaagtcgaataccgtctttagtcggaaggttgatgtcgtatccgatgtatgaggcaacattgttgttacaattttgaaaggcggtattatagtattcgtctttctgaatgtcgaacctatctaatagataccgtagtatattgagagtgtatccttgattatgttttatgaatagataaagtagatgttgtccttcttccttttgttcgtgccaattgagtaacattatgagaatatgacctgttgcacaatcgttccatgatgggtgtacaatcaagattattacgtatcctcgtatcggctcctcgagataaaagagcatacaccacacgaggactatgtttggtatactgttgaaggtaagtgtgtaaccgcgttaatgtttgctccataatctattatcgcgtagatgaatcgcttctcggctcgcatcttagtgtgacttgacttgtaataattgctttcgtagaacgtggatatgtgtttacagtagtaatgaagagaagtgagttcatcctcgtcggcgcaattagggtcggatcctttgtacagaacgtaatagtttaagctcccattgaatttatatctaagataacacagcaatagatcggatgatttactaaagtcatcaatggtgtccgttagtatatcaaagatcttgttatcgattgatagtggtcatccttgctatcaaagttacgcatgccgtggtgtaacaatatctttaatacagatggattaaatcgtgtattcatcgtatagcaatgtaatggagagttacctcgtttattcagatcgcagtgtttaataactagcttaaacagatgagacgatgtatctacatcaaagaacgtaaaatacatatgacagacattgttgacagaaacgtgaccttcattcttaccgtcgtccataaatacgttaggtatgtaccacatactgtcgcgaacgatgcgtacaatctcgtccatctcataatgatttactttttcataattaaagatgtgaaagaaaaaccgaacaatatatttttttagtaatgtttatgcgagacatataaaataaactccgtgtttatgatgccggtaaatgtttttatcatcttggacggaatcgattttgtaatatgtcatggaaacaaatgaaacaggacattatcgctccatgataaattatttaatggagtaataaagtatctccatgggtaatttcgaaatcaagttatcgtctgtattaatgttgtccactatggagtcgatcctctcattgttctttacagtttctgtaatgatggacgttagttcttttttgtaccatttgatgtcggattctttgcgtatctcaatctgtggcgtttgcttcgtttaaataatatatcaaacatggaaacgcctgatatgtagacattcttcattctattaatgtctactctatagcgctttagttccttatgacgaccggcgatatcatactttactttagaaggaaaatcatcatctaggattaaggcgtatctgatacaggcgaataatggttcaggatatagatagcgtatatctctattaaatgcgtcaatcatagtctctagagtgggatggtaactcagtaataaatcaactagcttcgttttgttttctctttggtaactgcttttctggatggccgtattgattatcgagcgtgacactcgctccatattccaataaccgctttgcaaattgtatattattgacatcgaccgcgtaatatagtagagttatcgatcatatctatatcatccatgtacttgcttagtatatcaaatacatctatcagtatggtttcataacagtgatacccgcaattattaaatctcgataatatcagaccgtacatacatagacggccattgttcgatacgtgatttacagccgcgtgtccatattttccacgataaaccttacgacgtttacatcgacgagattattattaacaaagtagtcgtgtagaggatagttgttgtccgtcgtcttatccatggttgctccgttatccaacatgcatcgaacgaccatatcgccgtaatgtaagtagtttatcagtatggcttgtacatcctgttgtctaaatctctttagaatgttatcgatgatgtagtggttatattctctggaatcgtacgaagtaatactacgcattacgtcgacaagagtatgacgtctctcaataagaagattaacgatttccatgtctacattatatggggttactctaaatcgcttgtttagataatacgcctctaatatagggctgacgtcgtatactctacacgtgtccacatcctttattaataataatttaacaatctctatatctatggttgagaaagaccagtagtattggatgggtaaagatcctccttcgtctctgccatggatggaaacattgttatcgatcaaacatttaattacatccttggatagagattgagattctctatgagacgatatatagtaatgaagagagttcttacacatatcactgtcgtacatacaggtacgaaatacgtaaccggtgctgtaacattctgatttaagaagccatagcaatacttctggtctcggattaggcgtcgttacgtatatatccaccaatccgagaccattgattgcataattcgtattcttggacggacgtatccgtttatccacaattaggtattttagcagacgtaagtcgatattatccgaatacagatcgaaatcatttatattcgacttgagttcgttagaggaattcgaatagctggatatcagtagatgcacaatttgagatttgacgtatctatgcttactgtatactcctagcggagttaatccttcgttgtttctacaaagtctctcgactccgcgagagaacaatcttaatgtctgtatcgcatttattggagacgtaacaatgtagcgcattgtttcctcgtctatctatatgttttgataagttgtgacacgtttcaatttctagttttatttttttgtacgtcacatcttcatccagtagacgacatagaatagtgcactctctaccacaataatccatagctattctggtgctaattattcctatttcacgaaggcaatcattcctcataagatgataaaaagtgtagtgagagagcatgaaggagatttagtatttagcagtgcggatatgatccaagagggtgagatagtcgttctcgttcagaatctttcgcagcataagtagtatgtcgatatacttatcgttgaagactctttataaaagtctatttgtttatatttattgcggatagcagtatttccctataaaaagtatacgtcctgtggtgtctttaatcatgtacatgaatggatggtttatgtagaccttcgtacgatataccatcgaaaagttaatcgtaaatactcctgtaacggccgatgcttctgtatactcctcattaacatctataaacgtcgtatgtagaaatttttctacagtgatagtttcattacacatcttgctaaaatctgcataatatccgaatatattagtaagtcctaaattttctaaaatcggtaccagattatacggttctgtcatttccactttaaactttggcatatacaagtctatacttttagtagataacataccacaccattttttaaatttttcatctgttatatttttttctatgttatatataccttctatgtcgtccggtagtataattaccatactagagtttccctcgtatggaatatcgataatagagaatcctccgaataattcattaatatgtacatattgcaagttattctcggtacccaccatcatatcaacgctggtaactatattcttagaaatataaaacttgtctgtatatgtaagatgtttagaaaatggatatttccacattgctttaaaatggacggcgctaacaactgtcatacgagtattaatggatagcggactagtcaataaggaattaattttaccatttgtcattgtcttaacccattcgttgattagttcctttgtttggttagcattattaaagtttacagtttgaaaatcgtcttttattttttgtaggaaggaggcgtggaactcgatactatcgctaccgtatattttatttgcggtagctagtgtcgcacaatacggaatatctacctccatgtcatcattattgtcatcgggtgtattctcattcatattctctatatattttgatagttgttcagctgtagaaccagctgctccatgatttagaatagataaagtagataaaatggaaactggagaaatcaaaacattttcatcagggtgttttacgattagttctttaaagatatccatggtatagacctaacgataacgatatatatcataaataaataatgttaaatttcagtttatgtttgtaccccgtattcatacttaacaaattggtattgcgtacacaatcaatcatattacataccattaataatgcaagcataaaaaatcgttagtagatgtttctaaatataggttccgtaagcaaagaatataagaatgaagcggtaatgataaaatcaatcgttatctaaaatgatcatactcatttattttattctattatattaacacatacatttttaacagcaacacattcaatattgtattgttatttttatattatttacacaattaacaatatattattagtttatattactgaattaataatataaaattcccaatcttgtcataaacacacactgagaaacagcataaacacagaatccatcaaaaatgttgataaattatctgatgttgttgttcgctgctatgataatcagatcattcgccgatagtggtaacgctatcgaaacgacattgccagaaattacaaacgctacaacagatattccagctatcagattatgcggtccagagggagatggatattgtttacacggtgactgtatccacgctagagatattgacggtatgtattgtagatgctctcatggttatacaggcattagatgtcagcatgtagtattagtagactatcaacgttcagaaaacccaaacactacaacgtcatatatcccatctcccggtattatgcttgtattagtaggcattattatgtgttgtctattatctgtttataggttcactcgacgaactaaactacctatacaagatatggttgtgccataatttttataaatttttttatgagtatttttacaaaaatgtataaagtgtatgtcttatgtatatttataaaaatgctaagtatgcgatgtatctatgttatttgtatttatctaaacaatacctctacctctagatattatacaaaaattttttatttcggcatattaaagtaaaatctagttaccttgaaaatgaatacagtgggtggttccgtatcaccagtaagaacataatagtcaaatacagtatccgattgagattttgcatacaatactagtctagaaagaaatttgtaatcatcttctgtgacgggagtccatatatctgtatcatcgtctagtttatcagtgtcccatgctatattcctgttatcatcattagttaatgaaaataactctcgtgcttcagaaaagtcaaatattgtatccatacatacatctccaaaactatcgcttatacgtttatctttaacgatacctatacctagatggttatttactaacagacattttccagatctattgactataactcctatagtttccacatcaaccaagtaatgatcatctattgttatataacaataacataactcttttccatttttatcagtatgtatatctatatcaacgtcgtcgttgtagtgaatagtagtcattgatctattatatgaaacggatatgtctagaacggcaattgttttacgtccagttaacactttctttgatttaaagtctagagtctttgcaaacataatatccttatccgactttatatttcctgtagggtggtataattttattttgcctccacatatcggtgtttccaaatatattactagacaatattccatatagttattagttaagggtacccaattagaacacgtacgcttattatcatcatttggatcgtatttcataaaagttattgtgttatcgatgtcaacacattctacattttttaatcgtctatatagtatttttctgatattttctataatatcagaattgtcttccatcggaagttgtatactatcggaatcagttacatgtttaaataattctctgatgtcattccttatacaatcaaattcattattaaacagtttaatagtctgtagacctttatcgtcgtaaatatccattgtcttattagttacgcttatttttatgtgtttttacgttgctttattatattttataagaatgattgtttgacgaatcacgagaactattaagacacattattaggtatatattataaaaaagtttttgattacgatgttataagaggaaagaggacacattaacatcatacatcaattaactacattcttataacatcgtaatcaaaagaattgcaattttgatgtataacaactgtcaatgggttatggaattgtatattacatattatacggtatgttggtaacgacaaataccggtcggtaattgtctgccggtgtaatagaattatatatatctatctattacaccggccttgtatacataataataagttgtggtagtatgatctccatatttataatttaggactttgtattcagtatttttggaatcataaaaaataaaaaaaagttttactaatttaaaatttaaaaagtatttacatttttttcactgtttagtcgcggatatggaattcgatcctgccaaaatcaatacatcatctatagatcatgtaacaatattacaatacatagatgaaccaaatgatataagactaacagtatgcattatccgaaatattatatcaatatcacaaaaataaatacacatttggctaatcaatttcgggcttggaaaaaacgtatcgccggaagggactatatgactaacttatctagagatacaggaatacaacaatcaaaacttactgaaactatacgtaactgtcaaaaaaatagaaacatatatggtctatatatacactacaatttagttattaattggataaccgatgtgattatcaatcaatattaagagggttggtaaattggtacatagctaataatacctatacacccaataatacaacaaccatttctgagttggatatcatcaaaatactaaataaatacgaggacgtgtatagagtaagtaaagaaaaagaatgtggaatttgctatgaagttgtttactcaaaacgatagatactttggtttattggattcgtgtactcatatattttgcataacatgcatcaatatatggcataaaacacgaagagaaaccggtgcgtcggataattgtcctatatgccgtacccgttttagaaacataacaatgagcaagttctataagctagttaactaataaataaaaagtttaatttgttgacgacgtatgtcgttattttttctcgtataaaagattaatttgattctaatataatctttagtattggataaatatcaattcaaattaattccattagattatatcataaataaaaatagtagcacacaactacttcagcaaacattctttttataaatgccatctagcgtagcgaggacacaagtgaacctataattatcaaatttattagtatcagtcacatgaaggactttacgtagagtgacgattccactatctgtggtacgaacggtttcatcttctttgatgccatcacccagatgttctataaacttggtatcctcgtccgatctcatatcctttgccaaccaatacatgtagctaaaattaggcataaatttcacacatcctgaacaatgaaattctccagaagatgttacaatgtctagatttggacatttggtttcaaccgcgttaacatatgagtgaacacacccatacatgaaagcgatgagaaataggattctcatcttgccaaaatatcactagaaaaaatttatttatcagttttaaaggtataaaaaatacttattgttgctcgaatattttgtatttgatggtatacggaagattagaaatgtaggtattatcatcaactgattctatggttttatgtattctatcatgtttcactattgcgttggaaataatatcatatgcttccacatatattttattttgttttaactcataatactcacgtaattctggattattggcatatctatgaataattttagctccatgatcagtaaatattaatgagaacatagtattaccacctaccattatttttttcatctcattcaattcttaattgcaaagatctatataatcattatagcgttgacttatggactctggaatcttagacgatgtacagtcatctataatcatggcatatttaatacattgttttatagcatagtcgttatctacgatgttagatatttctctcaatgaatcaatcacacaatctaatgtaggtttatgacataatagcattttcagcagttcaatgtttttagattcgttgatggcaatggctatacatgtatatccgttatttgatctaatgttgacatctgaaccggattctagcagtaaagatactagagattgtttattatatctaacagccttgtgaagaagtgtttctcctcgtttgtcaatcatgttaatgtctttaagataaggtaggcaaatgtttatagtactaagaattgggcaagcataagacatgtcacaaagacccttttttgtatgtataagtgtaaaaattataacatccatagttggatttacataggtgtccaatcgggatctctccatcatcgagataattgatggcatctcccttccttttttagtagatatttcatcgtgtaagaatcaatattaatatttctaaagtatccgtgtatagcctctttatttaccacagctccatattccactagagggatatcgccgaatgtcatatactcaattagtatatgttggaggacatccgagttcattgttttcaatatcaaagagatggtttccttatcatttctccatagtggtacaatactacacattattccgtgcggctttccattttccaaaaacaatttgaccaaatctaaatctacatctttattgtatctataatcactatttagataatcagccataattcctcgagtgcaacatgttagatcgtctatatatgaataagcagtgttatctattcctttcattaacaatttaacgatgtctatatctatatgagatgacttaatataatattgaagagctgtacaatagtttttatctataaaagacggcttgattccgtgattaattagacatttaacaacttccggacgcacatatgctctcgtatccgactctgaatacagatgagagatgatatacagatgcaatacggtaccgcaatttcgtagttgataatcatcatacgcgtatcagtactcgtcctcataaagaacactgcagccattttctatgaacaaatcaataattttagaaacaggatcattgtcattacataattttctataactgaacgatggttttcacatttaacactcaagtcaaatccatgttctaccaacacctttatcaagtcaacgtctacatttttggatttcatatagctgaatatattaaagttatttatgttgctaaatccagtggcttctagtagagccatcgctatatccttattaactttaacatgtctactatttgtgtattcttctaatggggtaagctgtctccaatttttgcgtaatggattagtgccactgtctagtagtagtttgacgacctcgacattattacaatgctcattaaaaaggtatgcgtgtaaagcattattcttgaattggttcctggtatcattaggatctctgtctttcaacatctgtttaagttcatcaagagccacctcctcattttccaaatagtcaaacattttgactgaatgagctactgtgaactctatacacccacacaactaatgtcattaaatatcatgtcaaaaacttgtacaattattaataaaaataatttagtgtttaaattttaccagttccagattttacacctccgttaatacctccattaaccccactggacgatcctcctccccacattccaccgccaccagatgtataagttttagatcctttattactaccatcatgtccatggataaagacactccacatgccgccactaccccctttagaagacatattaataagacttaaggacaagtttaacaataaaattaatcacgagtaccctactaccaacctacactattatatgattatagtttctatttttacagtaccttgactaaagtttctagtcacaagagcaatactaccaacctacactattatatgattatagtttctatttttataggaacgcgtacgagaaaatcaaatgtctaatttctaacggtagtgttgataaacgattgttatccgcggatacctcctctatcatgtcgtctattttcttactttgttctattaacttattagcattatatattatttgattataaaacttatattgcttattagcccaatctgtaaatatcggattattaacatatcgtttctttgtaggtttatttaacatgtacatcactgtaagcatgtccttaccatttattttaatttgacgcatatccgcaatttctttttcgcagtcggttataaattctatatatgatggatacatgctacatgtgtacttataatcgactaatatgaagtacttgatacatattttcagtaacgatttattattaccacctatgaataagtacctgtgatcgtctaggtaatcaactgttttcttaatacattcgatggttggtaatttactcagaataatttccaatatcttaatatataattctgctatttctgggatatatttatctgccagtataacacaaatagtaatacatgtaaacccatattttgttattatattaatgtctgcgccattatctattaaccattctactaggctgacactatgcgactcaatacaatgataaagtatactacatccatgtttatctattttgtttatatcatcaatatacggcttacaaagttttagtatcgataacacatccaactcacgcatagagaaggtagggaataatggcataatatttattaggttatcatcattgtcattatctacaactaagtttccattttttaaaatatactcgacaactttaggatctctattgccaaatttttgaaaatatttatttatatgcttaaatctatataatgtagctccttcatcaatcatacatttaataacattgatgtatactgtatgataagatacatattctaacaatagatcttgtatagaatctgtatatcttttaagaattgtggatattaggatattattacataaactattacacaattctaaaatataaaacgtatcacggtcgaataatagttgatcaactatataattatcgattttgtgatttttcttcctaaactgtttacgtaaatagttagatagaatattcattagttcatgaccactatagttactatcgaataacgcgtcaaatatttcccgtttaatatcgcatttgtcaagataataatagagtgtggtatgttcacgataagtataataacgcatctctttttcgtgtgaaattaaatagtttattacgtccaaagatgtagcataaccatcttgtgacctagtaataatataataatagagaactgttttacccattctatcatcataatcagtggtgtagtcgtaatcgtaatcgtctaattcatcatcccaattataatattcaccagcacgtctaatctgttctattttgatcttgtatccatactgtatgttgctacatgtaggtattcctttatccaataatagtttaaacacatctacattgggatttgatgttgtagcgtatttttctacaatattaataccatttttgatactatttatttctatacctttcgaaattagtaatttcaataagtctatattgatgttatcagaacatagatattcgaatatatcaaaatcattgatatttttatagtcgactgacgacaataacaaaatcacaacatcgtttttgatattattatttttcttggtaacgtatgcctttaatggagtttcaccatcatactcatataatggatttgcaccactttctatcaatgattgtgcactgctggcatcgatgttaaatgttttacaactatcatagagtatcttatcgttaaccatgattggttgttgatgctatcgcattttttggtttctttcatttcagttatgtatggatttagcacgtttgggaagcatgagctcatatgatttcagtactgtagtgtcagtactattagtttcaataagatcaatctctagatctatagaatcaaaacacgataggtcagaagataatgaatatctgtaggcttcttgttgtactgtaacttctggttttgttagatggttgcatcgtgctttaacgtcaatggtacaaattttatcctcgctttgtgtatcatattcgtccctactataaaattgtatattcagattatcatgcgatgtgtatacgctaacggtatcaataaacggagcacaccatttagtcataaccgtaatccaaaaatttttaaagtatatcttaacgaaagaagttgtgtcattgtctacggtgtatggtactagatcctcataagtgtatatatctagagtaatgtttaatttattaaatggttgataatatggatcctcgtgacaatttccgaagatggaaataagacataaacacgcaataaatctaattgcggacatggttactccttaaaaaaatacgaataatcaccttggctatttagtaagtgtcatttaacactatactcatattaatccatggactcataatctctatacgggattaacggatgttctatatacggggatgagtagttctcttctttaactttatactttttactaatcatatttagactgatgtatgggtaatagtgtttgaagagctcgttctcatcatcagaataaatcaatatctctgtttttttgttatacagatgtattacagcctcatatattacgtaatagaacgtgtcatctaccttattaactttcaccgcatagttgtttgcaaatacggttaatcctttgacctcgtcgatttccgaccaatctgggcgtataatgaatctaaactttaattgcttgtaatcattcgaaataatttttagtttgcatccgtagttatcccctttatgtaactgtaaatttctcaacgcgatatctccattaataatgatgtcgaattcgtgctgtatacccatactgaatggatgaacgaataccgacggcgttaatagtaatttactttttcatctttacatattgggtactagttttactatcataagtttataaattccacaagctactatggaataagccaaccatcttagtataccacacatgtcttaaagtttattaattaattacatgttgttttatatatatcgctacgaatttaaagagaaattagtttaggaagaaaaattatctatctacatcatcacgtctctgtattctacgatagagtgctactttaagatgcgacagatccgtgtcatcaaatatatactccattaaaatgattattccggcagcgaacttgatattggatatatcacaacctttgttaatatctacgacaatagacagcagtcccatggttccataaacagtgagtttatctttctttgaagagatattttgtagagatcttataaaactgtcgaatgacatcgcatttatatctttagctaaatcgtatatgttaccatcgtaatatctaaccgcgtctatcttaaacgtttccatcgctttaaagacgtttccgatagatggtctcatttcatcagtcatactgagccaacaaatataatcgtgtataacatctttgatagaatcagactctaaagaaaacgaatcggctttattatacgcattcatgataaacttaatgaaaaatgtttttcgttgtttaagttggatgaatagtatgtcttaataattgttattatttcattaattaatatttagtaacgagtacactctataaaaacgagaatgacataactaatcataactagttatcaaagtgtctaggacgcgtaattttcatatggtatagatcctgtaagcattgtctgtattctggagctattttctctatcgcattagtgagttcagaatatgttataaatttaaatcgaataacgaacataactttagtaaagtcgtctatattaactcttttattttctagccatcgtaataccatgtttaagatagtatattctctagttactacgatctcatcgttgtctagaatatcacatactgaatctacatccaattttagaaattggtctgtgttacatatctcttctatattattgttgatgtattgtcgtagaaaactattacgtagaccattttctttataaaacgaatatatagtactccaattatctttaccgatatatttgcacacataatccattctctcaatcactacatctttaagattttcgttgttaagatatttggctaaactatataattctattagatcatcaacagaatcagtatatatttttctagatccaaagacgaactctttggcgtcctctataatattcccagaaaagatattttcgtgttttagtttatcgagatctgatctgttcatatacgccatgattgtacggtacgttatgataaccgcataaaataaaaatccattttcatttttaaccaatactattcataattgagattgatgtaatactttgttactttgaacgtaaagacagtacacggatccgtatctccaacaagcacgtagtaatcaaatttggtgttgttaaacttcgcaatattcatcaatttagatagaaacttatactcatcatctgttttaggaatccatgtattattaccactttccaacttatcattatcccaggctatgtttcgtccatcatcgttgcgcagagtgaataattcttttgtattcggtagttcaaatatatgatccatgcatagatcggcaaagctattgtagatgtgatttttcctaaatctaatataaaactcgtttactagcaaacactttcctgatttatcgaccaagacacatatggtttctaaatctatcaagtggtggggatccatagttatgacgcagtaacatatattattacattcttgactgtcgctaatatctaaatatttattgttatcgtattggattctgcatatagatggcttgtatgtcaaagatatagaacacataaccaatttatagtcgcgctttacattctcgaatctaaagttaagagatttagaaaacattatatcctcggatgatgttatcactgtttctggagtaggatatattaaagtctttacagatttcgtccgattcaaataaatcactaaataatatcccacattatcatctgttagagtagtatcattaaatctattatattttatgaaagatatatcactgctcacctctatatttcgtacatttttaaactgtttgtataatatctctctgatacaatcagatatatctattgtgtcggtagacgataccgttacatttgaattaatggtgttccattttacaacttttaacaagttgaccaattcatttctaatagtatcaaactctccatgattaaatattttaatagtatccattttatatcactacggacacaaagtagctgacataaaccattgtataatttttatgttttatgtttattagcgtacacattttggaagttccggcttccatgtatttcctggagagcaagtagatgatgaggaaccagatagtttatatccgtacttgcacttaaagtctacattgtcgttgtatgagtatgatcttttaaacccgctagacaagtatccgtttgatattgtaggatgtggacatttaacaatctgacacgtgggtggatcggaccattctcctcctgaacacaggacactagagttaccaatcaacgaatatccactattgcaactataagttacaacgctcccatcggtataaaaatcctcgtatccgttatgtcttccgttggatatagatggaggggattggcatttaacagattcacaaataggtgcctcgggattccataccatagatccagtagatcctaattcacaatacgatttagattcaccgatcaactgatatccgctattacaagagtacgttatactagagccaaagtctactccaccaatatcaagttggccattatcgatatctcgaggcgatgggcatctccgtttaatacattgattaaagagtgtccatccagtacctgtacatttagcatatataggtcccattttttgctttctgtatccaggtagacatagatattctatagtgtctcctatgttgtaattagcattagcatcagtctccacactattcttaaatttcatattaatgggtcgtgacggaatagtacagcatgatagaacgcatcctattcccaacaatgtcaggaacgtcacgctctccaccttcatatttatttatccgtaaaaatgttatcctggacatcgtacaaataataaaaagcccatatatgttcgctattgtagaaattgtttttcacagttgctcaaaaacgatggcagtgacttatgagttacgttacactttggagtctcatctttagtaaacatatcataatattcgatattacgagttgacatatcgaacaaattccaagtatttgattttggataatattcgtattttgcatctgctataattaagatataatcaccgcaagaacacacgaacatctttcctacatggttaaagtacatgtacaattctatccatttgtcttccttaactatatatttgtatagataattacgagtctcgtgagtaattccagtaattacatagatgtcgccgtcgtactctacagcataaactatactatgatgtctaggcatgggagacttttttatccaacgatttttagtgaaacattccacatcgtttaatactacatatttttcatacgtggtataaactccacccattacatatatatcatcgtttacgaataccgacgcgcctgaatatctaggagtaattaagtttggaagtcttatccatttcgaagtgccgtgtttcaaatattctgccacacccgttgaaatagaaaattctaatcctcctattacatataactttccatcgttaacacaagtactaacttctgattttaacgacgacatattagtaaccgttttccattttttcgttttaagatctacccgcgatacggaataaacatgtctattgttaatcatgccgccaataatgtatagacaattatgtaaaacatttgcattatagaattgtctatctgtattaccgactatcgtccaatattctgttctaggagagtaatgggttattgtggatatataatcagagtttttaatgactactatattatgttttataccatttcgtgtcactggctttgtagatttggatatagttaatcccaacaatgatatagcattgcgcatagtattagtcataaacttgggatgtaaaatgttgatgatatctacatcgtttggatttttatgtatccactttaataatatcatagctgtaacatcctcatgatttacgttaacgtcttcgtgggataagatagttgtcagttcatcctttgataattttccaaattctggatcggatgtcaccgcagtaatattgttgattatttctgacatcgacgcattatatagttttttaattccatatcttttagaaaagttaaacatccttatacaatttgtgaaattaatattatgaatcatagtttttacacatagatctactacaggcggaacatcaattattatggcagcaactagtatcatttctacattgtttatggtgatgtttatcttcttccagcgcatatagtctaatagcgattcaaacgcgtgatagtttataccattcaatataatcgcttcatcctttagatggtgatcctgaatgcgtttaaaaaaattatacggagacgccgtaataatttccttattcacttgtataatttccccattgatagaaaatatcacgctttccattcttaaagtactataagtaattatagtataatgtaaacgtttatatattcaatatttttataaaaatcattttgacattaattcctttttaaatttccgtctatcatctatagaaacgtattctatgaatttataaaatgcttttacgtgtcctatcgtaggcgatagaaccgctaaaaagcctatcgaatttctacaaaagaatctgttatatggtatagggagagtataaaacattaaatgtccgtacttattaaagtattcagtagccaatcctaactctttcgaatacttattaatggctcttgttctgtacgaatctatttttttgaacaacggacctagtggtatatcttgttctatgtatctaaaataatgtctgactagatccgttagtttaatatccgcagtcatcttgtctagaatggcaaatctaactgcgggtttaggctttagtttagtttctatatctacatctatgtctttatctaacaccaaaaatataatagctaatattttattacaatcatccggatattcttctacgatctcactaactaatgtttctttggttatactagtatagtcactatcggacaaataaagaaaatcagatgatcgatgaataatacatttaaattcatcatctgtaagatttttgagatgtctcattagaatattattagggttagtactcattatcattcggcagctattacttattttattatttttcaccatatagatcaatcattagatcatcaaaatatgtttcaatcatcctaaagagtatggtaaatgactcttcccatctaatttctgaacgttcaccaatgtctctagccactttggcactaatagcgatcattcgcttagcgtcttctatattattaactggttgattcaatctatctagcaatggaccgtcggacagcgtcattctcatgttcttaatcaatgtacatacatcgccgtcatctaccaattcatccaacaacataagctttttaaaatcatcattataataggtttgatcgttgtcatttctccaaagaatatatctaataagtagagtcctcatgcttagttaacaactattttttatgttaaatcaattagtacaccgctatgtttaatacttattcatattttagtttttaggattgagaatcaatacaaaaattaatgcatcattaattttagaaatacttagtttccacgtagtcaatgaaacatttgaactcatcgtacaggacgttctcgtacaggacgtaactataaaccggtttatatttgttcaagatagatacaaatccgataactttttttacgaattctacgggatccactttaaaagtgtcataccgggttctttttatttttttaaacagatcaatggtgtgatgttgattaggtcttttacgaatttgatatagaatagcgtttacatatcctccataatggtcaatcgccatttgttcgtatgtcataaattctttaattatatgacactgtgtattatttagttcatccttgttcattgttaggaatctatccaaaatggcaattatactagaactataggtgcgttgtatacacatattgatgtgtctgtttatacaatcaatgctactaccttcgggtaaaattgtagcatcatataccatttctagtactttaggttcattattatccattgcagaggacgtcatgatcgaatcataaaaaaatatattatttttatgttattttgttaaaaataatcatcgaatacttcgtaagatactccttcatgaacataatcagttacaaaacgtttatatgaagtaaagtatctacgatttttacaaaagtccggatgcataagtacaaagtacgcgataaacggaataataatagatttatctagtctatctttttctatagctttcatagttagatacatggtctcagaagtaggattatgtaacatcagcttcgataaaatgactgggttatttagtcttacacattcgctcatacatgtatgaccgttaactacagagtctacactaaaatgattgaacaatagatagtctaccattgtttcgtattcagatagtacagcgtagtacatggcatcttcacaaattatatcattgtctaatagatatttgacgcatcttatggatcccacttcaacagccatcttaaaatcggtagaatcatattgctttcctttatcattaataatttctagaacatcatctctatcataaaagatacaaatattaactgtttgatccgtaataacattgctagtcgatagcaatttgttaataagatgcgctgggctcaatgtcttaataagaagtgtaagaggactatctccgaatttgttttgtttattaacatccgttgatggaagtaaaagatctataatgtctacattcttgactgttttagagcatacaatatggagaggtgtatttccatcatgatctggttttgagggactaattcctagtttcatcatccatgagattgtagaagcttttggattgtctgacataagatgtctatgaatatgatttttgccaaatttatccactatcctggcttcgaatccgatggacattatttttttaaacactctttctgaaggatctgtacacgccaacaacggaccacatccttcttcatcaaccgagttgttaatcttggctccatactgtaccaataaatttattctctctatgacttcatcatctgttcccgagagataatatagaggcgttttatgctgtttatcacacgcgtttggatctgcgccgtgcgtcagcagcatcgcgactattctattattattaattttagaagctatatgcaatggataatttccatcatcatccgtctcatttggagagtatcctctatgaagaagttcttcgacaaatcgttcatctagtcctttaattccacaatacgcatgtagaatgtgataattatttccagaaggttcgatagcttgtagcatattcctaaatacatctaaatttttactattatatttggcataaagagatagataatactcggccgacataatgttgtccattgtagtataaaaattaatatttctatttctgtatatttgcaacaatttactctctataacaaatatcataacttagttcttttatgtcaagaaggcactggtttagttcatctataaatgtcacgccataactaccacgcatgccatactcagaattatgataaagatatttatccttggggtgtaggtaatggggattaatctttgttggatcagtctctaagttaacacatgtcacacatgatccatttatagttatatcacacgatgatgatttatgaattgattccggaagatcgctatcgtattttgtggttccacaattcatttccatacatgttattgtcacactaatattatgatgaactttatctagccgctgagtggtaaacaacagaacagatagtttattatctttaccaacaccctcagccgctgccacaaatctctgatccgtatccatgatggtcatgtttatttctagtccgtatccagtcaacactatgttagcatttctgtcgatatagctttcactcatatgacactcaccaataatagtagaattaatgtcgtaatttacaccaatagtgagttcggcggcaaagtaccaataccggtaatcttgtcgaggaggacatatagtattcttgtattctaccgaatacccgagagatgcgatacaaaagagcaagactaatttgtaaaccatcttactcaaaatatgtaacaatagtacgatgcaatgagtaagacaataggaaatctatcttatatacacataattattctatcaattttaccaattagttagtgtaatgttaacaaaaatgtgggagaatctaattagtttttctttacacaattgacgtacatgagtctgagttccttgtttttgctaattatttcatccaatttattattcttgacgatatcgagatcttttgtataggagtcaaacttgtattcaacatgcttttctataatcattttagctatttcggcatcatccaatagtacattttccagattagcagaatagatattaatgtcgtatttgaacagagcctgtaacatctcaatgtctttattatctatagccaatttaatgtccggaatgaagagaagggaattattggtgtttgtcgacgtcatatagtcgagcaagagaatcatcatatccacgtgtccattttttatagtgatgtgaatacaactaaggagaatagccagatcaaaagtagatggtatctctgaaagaaagtaggaaacaatacttacatcattaagcatgacggcatgataaaatgaagttttccatccagttttcccatagaacatcagtctccaatttttcttaacaaacagttttaccgtttgcatgttaccactatcaaccgcataatacaatgcggtgtttcccttgtcatcaaattgtgaatcatccagtccactgaatagcaaaatctttactattttggtatcttccaatgtggctgcctgatgtaatggaaattcattctctagaagatttttcaatgctccagcgttcaacaacgtacatactagacgcacgttattatcagctattgcataatacaaggcactatgtccatggacatccgccttaaatgtatctttactagagagaaagcttttcagctgcttagacttccaagtattaattcgtgacagatccatgtctgaaacgagacgctaattagtgtatattttttcattttttataattttgtcatattgcaccagaattaataatatctttaatagatctgattagtagatacatggctatcgcaaaacaacatatacacatttaataaaaataatatttattaagaaaattcagatttcacgtacccatcaatataaataaaataatgattccttacaccgtacccatattaaggagattccaccttacccataaacaatataaatccagtaatatcatgtctgatgatgaacacaaatggtgtattaaattccagtttttcaggagatgatctcgccgtagctaccataatagtagatgcctctgctacagttccttgttcgtcgacatctatctttgcattctgaaacattttataaatatataatgggtccctagtcatatgtttaaacgacgcattatctggattaaacatactaggagccatcatttcggctatcgacttaatatccctcttattttcgatagaaaatttagggagtttaagattgtacactttattccctaattgagacgaccaatagtctaattttgcagccgtgatagaatctgtgaaatgggtcatattatcacctattgccaggtacatactaatattagcatccttatacggaaggcgtaccatgtcatattctttgtcatcgattgtgattgtatttccttgcaatttagtaactacgttcatcatgggaaccgttttcgtaccgtacttattagtaaaactagcattgcgtgttttagtgatatcaaacggatattgccatatacctttaaaatatatagtattaatgattgcccatagagtattattgtcgagcatattagaatctactacattagacataccggatctacgttctactatagaattaattttattaaccgcatctcgtctaaagtttaatctatataggccgaatctatgatattgttgataatacgacggtttaatgcacacagtattatctacgaaactttgataagttagatcagtgtacgtatatttagatgttttcagcttagctaatcctgatattaattctgtaaatgctggacccagatctctttttctcaaatccatagtcttcaataattctattctagtattacctgatgcaggcaatagcgacataaacatagaaaacgaataaccaaacggtgagaagacaatattatcatcttgaatatttttatacgctactataccggcattggtaaatccttgtagacgataggcggacgctgaacacgctaacgatagtatcaataacgcaatcatgattttatggtattaataattaaccttatttttatgttcggtataaaaaaattattgatgtctacacatccttttgtaattgacatctatatatccttttgtataatcaactctaatcactttaacttttacagttttccctaccagtttatccctatattcaacatatctatccatatgcatcttaacactctctgccaagatagcttcagagtgaggatagtcaaaaagataaatatatagagcataatcattctcgtatactctgccctttattacatcacccgcattgggcaacgaataacaaaatgcaagcatcttgttaacgggctcgtaaattgggataaaaattatgtttttattgtcttatatctattttattcaagagaatattcaggaatttctttttccggttgtatctcgtcgcagtatatatcatttgtacattgtttcatattttttaatagtttacaccttttagtaggactagtatcgtacaattcatagctgtattttgaattccaatcacgcataaaaatatcttccaattgttgacgaagacctaatccatcatccggtgtaatattaatagatgctccacatgtatccgtaaagtaatttcctgtccaatttgaggtacctatataggccgttttatcggttaccatatatttggcatggtttaccctagaatacggaatgggaggatcagcatctggtacaataaatagctttacttctatatttatgtttttagattttagcatagcgatagatcttaaaaagtttctcatgataaacgaagatcgttgccagcaactaatcaatagcttaacggatacttgtctgtctatagcggatcttcttaattcatcttctatataaggccaaaacaaaattttacccgccttcgaataaataatagggataaagttcataacagatacataaacgaatttactcgcatttctaatacatgacaataaagcggttaaatcattggttctttccatagtacatagttgttgcggtgcagaagcaataaatacagagtgtggaacgccgcttacgttaatactaagaggatgatctgtattataatacgacggataaaagtttttccaattatatggtagattgttaactccaagataccagtatacctcaaaaatttgagtgagatccgctgccaagttcctattattgaagatcgcaatacccaattccttgacctgagttagtgatctccaatccatgttagcgcttcctaaataaatatgtgtattatcagatatccaaaattttgtatgaagaactcctcctaggatatttgtaatatctatgtatcgtacttcaactccggccatttgtagtctttcaacatcctttaatggtttgttagatttattaacggctactctaactcgtactcctcttttgggtaattgtacaatctcgtttaatattatcgtgccgaaattcgtacccacttcatccgataaactccaataaaaagatgatatatctagtgtttttgtggtattggatagaatttccctccacatgttaaatgtagacaaatatactttatcaaattgcatacctataggaatagtttctgtaatcactgcgattgtattatccggattcattttatttgttaaaagaataatcctatatcacttcactctattaaaaatccaagtttctatttctttcatgactgattttttaacttcatccgtttccttatgaagatgatgtttggcaccttcataaatttttatttctctattacaatttgcatgttgcatgaaataatatgcacctaaaacatcgctaatcttattgtttgttccctggagtatgagagtcgggggggtgttaatcttggaaattatttttctaaccttgttggtagccttcaagacctgactagcaaatccagccttaattttttcatgattgactaatgggtcgtattggtatttataaactttatccatatctctagatactgattctggacatagctttccgactggcgcatttggtgtgatggttcccataagtttggcagctagcagattcagtcttgaaacagcatctgcattaactagaggagacattagaatcattgctgtaaacaagtttggattatcgtaagaggctagctcccatggaatgacccaataagtagatttaatagttaccacgtgctgtaccaaagtcatcaatcatcattttttcaccattacttcttccatgtccaatatgatcatgtgagaatactaaaattcctaacgatgatatgttttcagctagttcgtcataacgtccagaatgtttaccagctccatgacttatgaatactaatgccttaggatatgtaataggtttccaatatttacaatatatgtaatcattgtccagattgaacatacagtttgcactcatgattcacgttatataactatcaatattaacagttcgtttgatgatcatattatttttatgttttattgataattgtaaaaacatacaattaaatcaatatagaggaaggagacggctactgtcttttgtaagatagtcatggcgactaaattagattatgaggatgctgttttttactttgtggatgatgataaaatatgtagtcgcgactccatcatcgatctaatagatgaatatattacgtggagaaatcatgttatagtgtttaacaaagatattaccagttgtggaagactgtacaaggaattgatgaagttcgatgatgtcgctatacggtactatggtattgataaaattaatgagattgtcgaagctatgagcgaaggagaccactacatcaattttacaaaagtccatgatcaggaaagtttattcgctaccataggaatatgtgctaaaatcactgaacattggggatacaaaaagatttcagaatctagattccaatcattgggaaacattacagatttgatgaccgacgataatataaacatcttgatactttttctagaaaaaaaattgaattgatgatataggggtcttcataacgcataattattacgttagcattctatatccgtgttaaaaaaaattatcctatcatgtatttgagagttttatatgtagcaaacatgatagctgtgatgccaataagctttagatattcacgcgtgctagtgttagggatggtattatctggtggtgaaatgtccgttatataatctacaaaacaatcatcgcatatagtatgcgatagtagagtaaacatttttatagtttttactggattcatacatcgtctacccaattcggttataaatgaaattgtcgccaatcttacacccaaccccttgttatccattagcatagtattaacttcgttatttatgtcataaactgtaaatgattttgtagatgccatatcatacatgatattcatgtccctattataatcattactaactttatcacaatatatgttgataatatctatatatgatctagtctttgtgggcaactgtctatacaagtcgtctaaacgttgtttactcatatagtatcgaacagccatcattacatggtcccgttccgttgatagataatcgagtatgttagtggacttgtcaaatctatataccatattttctggaagtggatatacatagtcgtgatcaacattattgctagcctcatcttctatatcctgtactataccattatctatatcatctacataatctatgatattattacacataaacatcgacaacatactattgtttattatctaagtcctgttgatccaaacccttgatctcctctatttgtactatctagagattgtacttcttccagttctggataatatatacgttgatagattagctgagctattctatctccagtatttacattaaacgtacattttccattattaataagaatgactcctatgtttcccctataatcttcgtctattacaccacctcctatatcaatgccttttagtgacagaccagacctaggagctattctaccatagcagaacttaggcatggacatactaatatctgtcttaattaactgtctttctcctggagggatagtataatcgtaagcgctatacaaatcatatccggcagcacccggcgattgcctagtaggagatttagctctgttagtttccttaacaaatctaactggtgagttaatattcatgttgaacataaaactaatattttatttcaaaattatttaccatcccatatattccatgaataagtgtgatgattgtacacttctatagtatctatatacgatccacgataaaatcctcctatcaatagcagtttattatccactatgatcaattctggattatccctcggataaataggatcatctatcagagtccatgtattgctggattcacaataaaattccgcatttctaccaaccaagaataaccttctaccgaacactaacgcgcatgatttataatgaggataataagtggatggtccaaactgccactgatcatgattgggtagcaaatattctgtagttgtatcagtttcagaatgtcctcccattacgtatataacattgtttatggatgccactgctggattacatctaggtttcagaagactcggcatattaacccaagcagcatccccgtggaaccaacgctcaacagatgtgggatttggtagacctcctactacgtataatttattgttagcgggtatcccgctagcatacagtctggggctattcatcggaggaattggaatccaattgtttgatatataatttaccgctatagcattgttatgtatttcattgttcatccatccaccgatgagatatactacttctccaacatgagtacttgtacacatatggaatatatctataatttgatccatgttcataggatactctatgaatggatacttgtatgatttgcgtggttgtttatcacaatgaaatattttggtacagtctagtatccattttacattatttatacctctgggagaaagataatttgacctgattacatttttgataaggagtagcagatttcctaatttatttcttcgctttatataccacttaatgacaaaatcaactacataatcctcatctggaacatttagttcatcgctttctagaataagtttcatagatagataatcaaaattgtctatgatgtcatcttccagttccaaaaagtgtttggcaataaagtttttagtatgacataagagattggatagtccgtattctatacccatcatgtaacactcgacacaatattcctttctaaaatctcgtaagataaagtttatacaagtgtagatgataaattctacagaggttaatatagaagcacgtaataaattgacgacgttatgactatctatatatacctttccagtatacgagtaaataactatagaagttaaactgtgaatgtcaaggtctagacaaaccctcgtaactggatctttatttttcgtgtatttttgacgtaaatgtgtgcgaaagtaaggagataactttttcaatatcgtagaattgactattatattgcctcctatggcatcaataattgttttgaatttcttagtcatagacaatgctaatatattcttacagtacacagtattgacaaatatcggcatttatgtttctttaaaagtcaacatctagagaaaaatgattatctttttgagacataactcccattttttggtattcacccacacgtttttcgaaaaaattagtttttccttccaatgatatattttccatgaaatcaaacggattggtaacattataaatttttttaaatcccaattcagaaatcaatctatccgcgacgaattctatatatgttttcatcatttcacaattcattcctataagtttaactggaagagccgcagtaagaaattcttgttcaatggatactgcatctgttataatagatctaacggtttcttcactcggtggatgcaataaatgtttaaacatcaaacatgcgaaatcgcagtgcagaccctcgtctctactaattagttcgttggaaaacgtgagtccgggcattaggccacgctttttaagccaaaatatggaagcgaatgatccggaaaagaagattccttctactgcagcaaaggcaataagtctctctccataaccggcgctgtcatgtatccacttttgagcccaatcggccttcttttttacacaaggcatcgtttctatggcattaaagagatagtttttttcattactatctttaacataagtatcgatcaaaagactatacatttccgaatgaatgttttcaatggccatctgaaatccgtagaaacatctagcctcggtaatctgtacttctgtacaaaatcgttccgccaaattttcattcactattccgtcactggctgcaaaaaacgccaatacatgttttataaaatatttttcgtctggtgttagtttattccaatcattgatatctttagatatatctacttcttccactgtccaaaatgatgcctctgcctttttatacatgttccagatgtcatgatattggattgggaaaataacaaatctatttggatttggtgcaaggatgggttccataactaaattaacaataacaataaattttttttcagttatctatatgcctgtacttggattttttgtacatcgatatcgccgcaatcactacaataattacaagtattattgatagcattgttattagtactatcataattaaattatctacattcatgggtgctgaataatcgttattatcatcattatcattttgtaattgtgacatcatactagataaatcgtttgcgagattgttgtgggaagcgggcatggaggatgcattatcattattatttaacgccttccatttggattcacaaatgttacgcacattcaacattttatggaaactataattttgtgaaaacaaataacaagaaaactcgtcatcgttcaaatttttaacgatagtaaaccgattaaacgtcgagctaatttctaacgctagcgactctgttggatatgggtttccagatatatatcttttcagttcccctacgtatctataatcatctgtaggaaatggaagatatttccatttatctactgttcctaatatcatatgtggtggtgtagtagaaccattaagcgcgaaagatgttatttcgcatcgtattttaacttcgcaataatttctggttagataacgcactctaccagtcaagtcaatgatattagcctttacagatatattcatagtagtcgtaacgatgactccatcttttagatgcgatactcctttgtatgtaccagaatcttcgtacctcaaactcgatatatttaaacaagttaatgagatattaacgcgttttatgaatgatgatatataaccagaagttttatcctcggtggctagcgctataaccttatcattataataccaactagtgtgattaatatgtgacacgtcagtgtgggtacaaatatgtacattatcgtctacgtcgtattcgatacatccgcatacagccaacaaatataaaatgacaaatactctaacgccgttcgtacccatcttgatgcggtttaataaatgttttgatttcaatttattgtaaaaaaagattcggttttatactgttcgatattctcattgcttatattttcatctatcatctccacacagtcaaatccgtggttagcatgcacctcatcaaccggtaaaagactatcggactcttctatcattataactctagaatatttaatttggtcattattaatcaagtcaattatcttatttttaacaaacgtgagtattttactcattttttataaaaacttttagaaatatacagactctatcgtgtgtctatatcttctttttatatccaatgtatttatgtctgatttttcttcatttatcatatataatggtccaaattctacacgtgcttcggattcatccagatcattaaggttcttataattgtaacatccttctcttccctcttctacatcttccttcttattcttattcttagcgtcacagaatctaccacagcaggatcccatgacgagcgtcatattaaactaatccattttcaattataatatatgattagtaatgaccattaaaataaaaaatattcttcataaccggcaagaaagtgaaaagttcacattgaaactatgtcagtagtatacatcatgaaatgatgatatatatatactctattttggtggaggattatatgatataattcgtggataatcatttttaagacacatttctttattcgtaaatcttttcacgttaaatgagtgtccatattttgcaatttcttcatatgatggcggtgtacgtggacgaggctgctcctgttcttgttgtggtcgccgactgtcgtgtctgcgtttagatccctccattatcgcgattgcgtagatggagtactattttataccttgtaattaaatttttttattaattaaacgtataaaaacgttccgtatctgtatttaagagccagatttcgtctaatagaacaaatagctacagtaaaaataactagaataattgctacacccactagaaaccacggatcgtaatacggcaatcggttttcgataataggtggaacgtatattttatttaaggacttaacaattgtctgtaaaccacaatttgcttccgcggatcctgtattaactatctgtaaaagcatatgttgaccgggcggagccgaacattctccgatatctaatttctgtatatctataatattattaacctccgcatacgcattacagttcttttctagcttggataccgcactaggtacatcgtctagatctattcctatttcctcagcgatagctcttctatccttttccggaagcaatgaaatcacttcaataaatgattcaaccatgagtgtgaaactaagtcgagaattactcatgcatttgttagttattcggagcgcgcaatttttaaactgtcctataacctctcctatatgaatagcacaagtgacattagtagggatagaatgttgagctaatttttgtaaataactatctataaaaagattatacaaagttttaaactctttagtttccgccatttatccagtctgagaaaatgtctctcataataaatttttccaagaaactaattgggtgaagaatggaaacctttaatctatatttatcacagtctgttttggtacacatgatgaattcttccaatgccgtactaaattcgatatctttttcgatttctggatatgtttttaataaagtatgaacaaagaaatggaaatcgtaataccagttatgtttaactttgaaattgttttttattttcttgttaatgattccagccacttgggaaaagtcaaagtcgtttaatgccgatttaatacgttcattaaaaacaaactttttatcctttagatgaattattattggttcattggaatcaaaaagtaagatattatcgggtttaagatctgcgtgtaaaaagttgtcgcaacagggtagttcgtagattttaatgtataacagagccatctgtaaaaagataaactttatgtattgtaccaaagatttaaatcctaatttgatagctaactcggtatctactttatctgccgaatacagtgctaggggaaaaattataatgtttcctctttcatattcgtagttagttctcttttcatgttcgaaaaagtgaaacatgcggttaaaatagtttataacattaatattactgttaataactgccggataaaagtgggatagtaatttcacgaatttgatactgtcctttctctcgttaaacgcctttaaaaaaactttagaagaatatctcaatgagagttcctgaccatccatagtttgtatcaataatagcaacatatgaagaacacgtttatacagagtatgtaaaaatgttaatttatagtttaatcccatggcccacgcacacacgattaattttttttcatctccctttagattgttgtatagaaatttgggtactgtgaactccgccgtagtttccatgggactatataattttgtggcctcgaatacaaattttactacatagttatctatcttaaagactataccatatcctcctgtagatatgtgataaaaatcgtcgtttataggataaaatcgtttatccttttgttggaaaaaggatgaattaatgtaatcattctcttctatctttagtagtgtttccttattaaaattcttaaaataatttaacaatctaactgacggagcccaattttggtgtaaatctaattgggacattatattgttaaaatacaaacagtctcctaatataacagtatctgataatctatggggagacatccattgatattcaggggatgaatcattggcaacacccatttattgtacaaaaagccccaatttacaaacgaaagtccaggtttgatagagacaaacaattaactattttgtctctgtttttaacacctccacagtttttaatttctttagtaatgaaattattcacaatatcagtatcttctttatctaccagagattttactaacttgataaccttggctgtctcattcaatagggtagtaatatttgtatgtgtgatattgatatctttttgaattgtttcttttagaagtgattctttgatggtgccagcatacgaattacaataatgcagaaactcggttaacatgcaggaattatagtaagccaattccaattgttgcctgtgttgtattagagtgtcaatatgagcaatggtgtccttgcgtttctctgatagaatgcgagcagcgattttggcgttatcatttgacgatatttctggaatgacgaatcctgtttctactaactttttggtaggacaaagtgaaacaatcaagaagatagcttctcctcctatttgtggaagaaattgaactcctctagatgatctactgacgatagtatctccttgacagatattggaccgaattacagaagtacctggaatgtaaagccctgaaaccccctcattttttaagcagattgttgccgtaaatcctgcactgtgaccaagatagagagctcctttggtgaatccatctctatgtttcagtttaaccaagaaacagtcagctggtctaaaatttccatctctatctaatacagcatctaacttgatgtcaggaactatgaccggtttaatgttatatgtaacattgagtaaatccttaagttcataatcatcactgtcatcagttatgtacgatccaaacaatgtttctaccggcatagtggatacgaagatgctatccatcagaatgtttccctgattagtattttctatatagctattcttctttaaacgattttccaaatcagtaactatgttcatttttttaggagtaggacgcctagccagtatggaagaggattttctagatcctctcttcaacatctttgatctcgatggaatgcaaaaccccatagtgaaacaaccaacgataaaaataatattgtttttcactttttataattttaccatctgactcatggattcattaatatctttataagagctactaacgtataattctttataactgaactgagatatatacaccggatctatggtttccataattgagtaaatgaatgctcggcaataactaatggcaaatgtatagaacaacgaaattatactagagttgttaaagttaatattttctatgagctgttccaataaattatttgttgtaactgcgttcaagtcataaatcatcttgatactatccagtaaaccgtttttaagttctggaatattatcatcccattgtaaagcccctaattcgactatcgaatatcctgctctgatagcagtttcaatatcgacggacgtcaatactgtaataaaggtggtagtattgtcatcatcgtgataaactactggaatatggtcgttagtaggtacagtaactttacacaacgcgatatataactttccttttgtaccatttttaacgtagttgggacgtcctgcagggtattgttttgaagaaatgatatcgagaacagatttgatacgatatttgttggattcctgattattcactataatataatctagacagatagatgattcgataaatagagaaggtatatcgttggtaggataatacatccccattccagtattctcggatactctattgatgacactagttaagaacatgtcttctattctagaaaacgaaaacatcctacatggactcattaaaacttctaacgctcctgattgtgtctcgaatgcctcgtacaaggatttcaaggatgccatagattctttgaccaacgatttagaattgcgtttagcatctgatttttttattaaatcgaatggtcggctctctggtttgctaccccaatgataacaatagtcttgtaaagataaaccgcaagaaaatttatacgcatccatccaaataaccctagcaccatcggatgatattaatgtattattatagattttccatccacaattattgggccagtatactgttagcaacggtatatcgaatagattactcatgtaacctactagaatgatagttcgtgtactagtcataatatctttaatccaatctaaaaaatttaaaattagattttttacactgttaaagttaacaaaagtattacccgggtacgtggatatcatatatggcattggtccattatcagtaatagctccataaactgatacggcgatggtttttatatgtgtttgatctaacgaggaagaaattcgcgcccacaattcatctctagatatgtatttaatatcaaacggtaacacatcaatttcgggacgcgtatatgtttctaaatttttaatccaaatataatgatgacctatatgccctattatcatactgtcaactatagtacacctagggaacttacgatacatctgtttcctataatcgttaaattttacaaatctataacatgctaaaccttttgacgacagccattcattaatttctgatatggaatctgtattctcgataccgtatcgttctaaagccagtgctatatctccctgttcgtgggaacgctttcgtataatatcgatcaacggataatctgaagtttttggagaataatatgactcatgatctatttcgtccataaacaatctagacataggaattggaggcgatgatcttaattttgtgcaatgagtcgtcaatcctataacttctaatcttgtaatattcatcatcgacataatactatctatgttatcatcgtatattagtataccatgaccttcttcatttcgtgccaaaatgatatacagtcttaaatagttacgcaatatctcaatagtttcataattgttagctgttttcatcaaggtttgtatcctgtttaacatgatggcgttctataacgtctctattttctatttttaattttttaaatttttaacgatttactgtggctagatacccaatctctctcaaatatttttttagcctcgcttacaagctgtttatctatactattaaaactgacgaatccgtgattttggtaatgggttccgtcgaaatttgccgaagtgatatgaacatattcgtcgtcgactatcaacaattttgtattattctgaatagtgaaaaccttcacagatagatcattttgaacacacaacgcatctagacttttggcggttgccatagaatatacgtcgttcttatcccaattaccaactagaagtctgatcttaactcctctattaatggctgcttctataatggagttgtaaatgtcgggccaatagtagctattaccgtcgacacgtgtagtgggaactatggccaaatgttcaatatctatactagtcttagctgacctgagtttatcaataactacatcggtatctagatctctagaatatcccaataggtgttccggagaatcagtaaagaacactccacctataggattcttaatatgatacgcagtgctaactggcaaacaacaagccgcagagcataaattcaaccatgaattttttgcgctattaaaggctttaaaagtatcaaatcttctacgaagatctgtggccagcgggggataatcagaatatacacctaacgttttaatcgtatgtatagatcctccagtaaatgacgcgtttcctacataacatctttcatcatctgacacccaaaaacaaccgagtagtagtcccacattattttttttatctatattaacggttataaaatttatatccgggcagtgactttgtagctctcccagatttcttttccctcgttcatctagcaaaactattattttaatccctttttcagatgcctcttttagtttatcaaaaataagcgctcccctagtcgtactcagaggattacaacaaaaagatgctatgtatatatatttcttagctagagtgataatttcgttaaaacattcaaatgttgttaaatgatcggatctaaaatccatattttctggtagtgtttctaccagcctacattttgctcccgcaggtaccgatgcaaatggccacatttagttaacataaaaacttatacatcctgttctatcaacgattctagaatatcatcggctatatcgctaaaattttcatcaaagtcgacatcacaacctaactcagtcaatatattaagaagttccatgatgtcatcttcgtctatttctatatccgtatccattgtagattgttgaccgattatcgagtttaaatcattactaatactcaatccttcagaatacaatctgtgtttcattgtaaatttataggcggtgtatttaagttggtagattttcaattatgtattaatatagcaacagtagttcttgctcctccttgattctagcatcctcttcattattttcttctacgtacataaacatgtccaatacgttagacaacacaccgacgatggcggccgctacagacacgaatatgactaaaccgatgaccatttaaaaacccctctctagctttcacttaaactgtatcgatcattcttttagcacatgtataatataaaaacattattctatttcgaatttaggcttccaaaaatttttcatccgtaaaccgataataatatatatagacttgttaatagtcggaataaatagattaatgcttaaactatcatcatctccacgattagagatacaatatttacattctttttgctgtttcgaaactttatcaatacacgttaatacaaacccaggaaggagatattgaaactgaggctgttgaaaatgaaacggtgaatacaataattcagataatgtaaaatcatgattccgtattctgatgatattagaactgctaatggatgtcgatggtatgtatctaggagtatctattttaacaaagcatcgatttgctaatatacaattatccttttgattaattgttattttattcatattcttaaaaggtttcatatttatcaattcttctacattaaaaatttccatttttaatttatgtagccccgcaatactcctcattacgtttcattttttgtctataatatccattttgttcatctcggtacatagattatccaattgagaagcgcatttagtagttttgtacattttaagtttattgacgaatcgtcgaaaactagttatagttaacattttattatttgataccctgatattaatacccctgccgttactattatttataactgatgtaatccacgtaacattagaattaattatcgatagtaatgcatcgacgcttccaaaattgtctattataaactcaccgataatttttttattacatgttttcatattcattaggattatcaaatctttaatcttattacgattgtatgcgttgatattgcaagacgtcattctaaaagacggaggatctccatcaaatgccaaacaatcacgtacaaagtacatggaaataggttttgttctattgcgcatcatagatttatatagaacacccgtagaaatactaatttgttttactctataaaatactaatgcatctatttcatcgttttgtataacgtctttccaagtgtcaaattccaaatttttttcattgatagtaccaaattcttctatctctttaactacttgcatagataggtaattacagtgatgcctacatgccgttttttgaaactgaatagatgcgtctagaagcgatgctacgctagtcacaatcaccactttcatatttagaatatatgtatgtaaaaatatagtagaatttcattttgttttttctatgctataaatgaattctcattttgcatctgctcatactccgttttatatcaataccaaagaaggaagatatctggttctaaaagccgttaaagtatgcgatgttagaactgtagaatgcgaaggaagtaaagcttcctgcgtactcaaagtagataaaccctcatcgcccgcgtgtgagagaagaccttcgtccccgtccagatgcgagagaatgaataaccctggaaaacaagttccgtttatgagaacggacatgctacaaaatatgttcgcggctaatcgcgacaacgtggcgtcgagacttttgtcctaaaatacaattatatctttttcgatattaataaatccgtgtcgtccaggttttttatctctttcagtatgtgaatagataggtattttatctctattcatcatcgaatttaagagatccgataaacattgtttgtattctccagatgtcagcatctgatacaacaatatatgtgcacataaacctctggcacttatttcatgtaccttccccttatcactaaggagaatagtatttgagaaatatgtatacatgatattatcatgaattagatatacagaatttgtaacactctcgaaatcacacgatgtgtcggcgttaagatctaatatatcactcgataacacattttcatctagatacactagacattttttaaagctaaaatagtctttagtagtaacagtaactatgcgattattttcatcgatgatacatttcatcggcatattattacgcgtaccatcaaagactataccatgtgtatatctaacgtattctagcatggttgccatacgcgcattaaacttttcaggatctttggatagatcttccaatctatctatttgagaaaacatttttatcatgttcaatagttgaaacgtcggatccactatatagatattatctataaagattttaggaactacgttcatggtatcctggcgaatattaaaactatcaatgatatgattatcgttttcatcttttatcaccatatagtttctaagatatgggattttacttaatataatattatttcccgtgataaattttattagaaaggccaaatctataagaaaagtcctagaattagtctgaagaatatctatatcgccgtatagtatatttggattaattagatatagagaatatgatccgtaacatatacaacttttattatggcgtctaagatattcttccatcaacttattaacatttttgactagggaagatacattatgacgtcccattacttttgccttgtctattactgcgacgttcatagaatttagcatatctcttgccaattcttccattgatgttacattataagaaattttagatgaaattacatttggagctttaatagtaagaactcctaatatgtccgtgtatgtggtcactaatacagattgtagttctataatcgtaaataatttacctatattatatgtttgagtctgtttagaaaagtagctaagtatacgatcttttatttctgatgcagatgtattaacatcggaaaaaaatctttttttattcttttttactaaagatacaaatatgtctttgttaaaaacagttattttctgaatatttctagcttgtaattttaacatatgatattcgttcacactaggtactctgcctaaataggtttctataatctttaatgtaatattaggaaaagtattctgatcaggattcctattcattttgaggatttaaaactctgattattgtctaatatggtctctacgcaaactttttcacagagcgatagagtttttgataactcgtttttcttaagaaatataaaactactgtttccagagctcgctctatcttttattttatctaattcgatacaaactcctgatactggttcagaaagtaattcattaattttcagtcctttatagaagatatttaatatagataatacaaaattttcagttcttgatatcgatctgattgatcctagaactagatatattaataacgtgctcattaggcagtttatggcagcttgataattagatatagtatattccagttcatatttattagataccgcattgcccagattttgatattctatgaattcctctgaaaataaatccaaaataactagacattctattttttgtggattagtgtactctcttccctctatcatgttcactactggtgtccacgatgataaatatctagagggaatataatatagtccataggatgccaatctagcaatgtcgaataactgtaatttgattcttcgttcttcattatgaattgattcttgaggtataaacctaacacaaattatattattagacttttcgtatgtaatgtctttcatgttataagtttttaatcctggaatagaatctattttaatgaggcttttaaacgcagagttctccaacgagtcaaagcataatactctgttgtttttcttatatacgatgttacgattttcttctttgaatggaataggtttttgaattagtttataattacaacataatagataaggaagtgtgcaaatagtacgcggaaaaaacataatagctcccctgttttcatccatggttttaagtaaatgatcactggcttctttagtcaatggatattcgaacattaaccgtttcatcatcattggacagaatccatatttcttaatgtaaagagtgatcaaatcattgtgtttattgtaccatcttgttgtaaatgtgtattcggttatcggatctgctcctttttctattaaagtatcgatgtcaatctcgtctaagaattcaactatatcgacatatttcatttgtatacacataaccattactaacgtagaatgtataggaagagatgtaacgggaacagggtttgttgattcgcaaactattctaatacataattcttctgttaatacgtcttgcacgtaatctattatagatgccaagatatctatataattattttgtaagatgatgttaactatgtgatctatataagtagtgtaataattcatgtattttgatatatgttccaactctgtctttgtgatgtctagtttcgtaatatctatagcatcctcaaaaaatatattcgcatatattcccaagtcttcagttctatcttctaaaaaatcttcaacgtatggaatataataatctattttacctcttctgatatcattaatgatatagtttttgacactatcttctgtcaattgattcttattcactatatctaagaaacggatagcgtccctaggacgaactactgccattaatatctctattatagcttctggacataattcatctattataccagaattaatgggaactattccgtatctatctaacatagttttaagaaagtcagaatctaagacttgatgttcatatattggttcatacatgaaatgatctctattgatgatagtgactatttcattctctgaaaattggtaactcattctatatatgctttccttgttgatgaaggatagaatatactcaatagaatttgtaccaacaaactgttctcttatgaatcgtatatcatcatctgaaataatcatgtaaggcatacatttaacaattagagacttgtctcctgttatcaatatactattcttgtgataatttatgtgtgaggcaaatttgtccacgttctttaattttgttatagtagatatcaaatccaatggagctacagttcttggcttaaacagatatagtttttctggaacaaattctacaacattattataaaggactttgggtaaataagtgggatgaaatcctattttaattaatgcgatagccttgtcctcgtgcagatatccaaacgcttttgtgatagtatggcattcattgtctagaaacgctctacgaatatctgtgacagatatcatctttagagaatatactagtcgcgttaatagtactacaatttgtattttttaatctatctcaataaaaaaattaatatgtatgattcaatgtataactaaactactaactgttattgataactagaatcagaatctaatgatgacgtacccaagaagtttatctactgccaatttagctgcattatttttagcatctcgtttagattttccatctgccttatcgaatactcttccgtcgatatctacacaggcataaaatgtaggagagttactaggcccaactgattcaatacgaaaagaccaatctctcttagttatttggcagtactcattaataacggtgacagggttagcatctttccaatcaataatttttttagccggaataacatcatcaaaagacttatgatcctctctcattgatttttcgcgggatacatcatctattatgacgtcagccataacatcagcatccggcttatccgcctccgttgtcataaaccaacgaggaggaatatcgtcggagctgtacaccatagcactacgttgaagatcgtacagagctttattaacttctcgcttctccatattaagttgtctagttagttgtgcagcagtagctccttcgattccaatggttttaatagcctcacacacaatctctgcgttagaacgttcgtcgatatagattttagacatttttagagagaactaacacaaccagcaataaaactgaacctactttatcatttttttattcatcatcctctggtggttcgtcgttcctatcaaatgtagctctgattaacccgtcatctataggtgatgctggttctggagattctggaggagatggattattatctggaagaatctctgttatttccttgttttcatgtatcgattgcgttgtaacattaagattgcgaaatgctctaaatttgggaggcttaaagtgttgtttgcaatctctacacgcgtgtctaactagtggaggttcgtcagctgctctagtttgaatcatcatcggcgtagtattcctacttttacagttaggacacggtgtattgtatttctcgtcgagaacgttaaaataatcgttgtaactcacatcctttattttatctatattgtattctactcctttcttaatgcattttataccgaataagagatagcgaaggaattctttttcggtgccgctagtacccttaatcatatcacatagtgttttatattccaaatttgtggcaatagacggtttatttctatacgatagtttgtttctggaatcctttgagtattctataccaatattattctttgattcgaatttagtttcttcgatattagattttgtattacctatattcttgatgtagtactttgatgatttttccatggcccattctattaagtcttccaagttggcatcatccacatattgtgatagtaattctcggatatcagtagcggctaccgccattgatgtttgttcattggatgagtaactactaatgtatacattttccatttataacacttatgtattaactttgttcatttatattttttcattattatgttgatattaacaaaagtgaatatatatatatgttaataattgtattgtggttatacggctacaattttataatgagtgaaagtcagtgtccgatgatcaatgacgatagctttactctgaaaagaaagtatcaaatcgatagtgcggagtcaacaataaaaatggataagaagaggataaagtttcagaatagagccaaaatggtaaaagaaataaatcagacaataagagcagcacaaactcattacgagacattgaaactaggatacataaaatttaagagaatgattaggactactactctagaagatatagcaccatctattccaaataatcagaaaacttataaactattctcggacatttcagccatcggcaaagcatcacagaatccgagtaagatggtatatgctctgctgctttacatgtttcccaatttgtttggagatgatcatagattcattcgttatagaatgcatccaatgagtaaaatcaaacacaagatcttctctcctttcaaacttaatcttattagaatattagtggaagaaagattctataataatgaatgcagatctaataaatggaaaataattggaacacaagttgataaaatgttgatagctgaatctgataaatatacaatagatgcaaggtataacctaaaacccatgtatagaatcaagggagaatctgaagaagataccctcttcatcaaacagatggtagaacaatgtgtgacatcccaggaattggtggaaaaagtgttgaagatactgtttagagatttgttcaagagtggagaatacaaagcgtacagatacgatgatgatgtagaaaatggattcattggattggatacactaaaattaaacattgttcatgatatagttgaaccatgtatgcctgttcgtaggccagtggctaagatactgtgtaaagaaatggtaaataaatactttgagaatccgctacatattattggtaagaatcttcaagagtgcattgactttgttagtgaataggcatttcatctttctccaatactaattcaaattgttaaattaataatggatagtataaatagtaaaaataattattagaataagagtgtagtatcatagataactctcttctataaaaatggattttattcgtagaaagtatcttatatacacagtagaaaataatatagattttttaaaggatgatacattaagtaaagtaaacaattttaccctcaatcatgtactagctctcaagtatctagttagcaattttcctcaacacgttattactaaggatgtattagctaataccaatttttttgttttcatacatatggtacgatgttgtaaagtgtacgaagcggttttacgacacgcatttgatgcacccacgttgtacgttaaagcattgactaagaattatttatcgtttagtaacgcaatacaatcgtacaaggaaaccgtgcataaactaacacaagatgaaaaatttttagaggttgccgaatacatggacgaattaggagaacttataggcgtaaattatgacttagttcttaatccattatttcacggaggggaacccatcaaagatatggaaatcatttttttaaaactgtttaagaaaacagacttcaaagttgttaaaaaattaagtgttataagattacttatttgggcatacctaagcaagaaagatacaggcatagagtttgcggataatgatagacaagatatatacactctatttcaacaaactggtagaatcgtccatagcaatctaacagaaacgtttagagattatatctttcccggagataagactagctattgggtgtggttaaacgaaagtatagctaatgatgcggatatcgttcttaatagacccgccattaccatgtatgataaaattcttagttatatatactctgagataaaacaaggacgcgttaataaaaacatgcttaagttagtttatatctttgagcctgaaaaagatatcagagaacttctgctagaaatcatatatgatattcctggagatatcctatctattattgatgcaaaaaacgacgattggaaaaaatattttattagtttttataaagctaattttattaacggtaatacatttattagtgatagaacgtttaacgaggacttattcagagttgttgttcaaatagatcccgaatatttcgataatgaacgaattatgtctttattctctacgagtgctgcggacattaaacgatttgatgagttagatattaataacagttatatatctaatataatttatgaggtgaacgatatcacattagatacaatggatgatatgaagaagtgtcaaatctttaacgaggatacgtcgtattatgttaaggaatacaatacatacctgtttttgcacgagtcggatcccatggtcatagagaacggaatactaaagaaactgtcatctataaaatccaagagtagacggctgaacttgtttagcaaaaacattttaaaatattatttagacggacaattggctcgtctaggtcttgtgttagatgattataaaggagacttgttagttaaaatgataaaccatcttaagtctgtggaggatgtatccgcattcgttcgattttctacagataaaaaccctagtattcttccatcgctaatcaaaactattttagctagttataatatttccatcatcgtcttatttcaaaggtttttgagagataatctatatcatgtagaagaattcttggataaaagcatccatctaaccaagacggataagaaatatatacttcaattgataagacacggtagatcatagaacagaccaaatatattattaataatttgtatatacatagatataattatcacatatttttgataaatgggaactgctgcaacaattcagactcccaccaaattaatgaataaagaaaatgcagaaatgattttggaaaaaattgttgatcatatagttatgtatattagtgacgaatcaagtgattcagaaaataatcctgaatatattgattttcgtaacagatacgaagactatagatctctcattataaaaagtgatcacgagtttgtaaagctatgtaaaaatcatgcggagaaaagttctccagaaacgcaacaaatgattatcaaacacatatacgaacaatatcttattccagtatctgaagtactattaaaacctataatgtccatgggtgacataattacatataacggatgtaaagacaatgaatggatgctagaacaactctctaccctaaactttaacaatctccgcacatggaactcatgtagcataggcaatgtaacgcgtctgttttatacattttttagttatctgatgaaagataaactaaatatataagtataatcccattctaatactttaacctgatgtattagcatcttattagaatattaacctaactaaaagacataacataaaaactcattacatagttgataaaaagcggtaggatataaatattatggctgccaccgttccgcgttttgacgacgtgtacaaaaatgcacaaagaagaattctagatcaagaaacattttttagtagaggtctaagtagaccgttaatgaaaaacacatatctatttgataattacgcgtatggatggataccagaaactgcaatttggagtagtagatacgcaaacttagatgcaagtgactattatcccatttcgttgggattacttaaaaagttcgagtttctcatgtctctatataaaggtcctattccagtatacgaagaaaaagtaaatactgaattcattgctaatggatctttctccggtagatacgtatcatatcttagaaagttttctgctcttccaacaaacgagtttattagttttttgttactgacttccattccaatctataatatcttgttctggtttaaaaatactcagtttgatattactaaacacacattattcagatacgtctatacagataatgccaaacacctggcgttggctaggtatatgtatcaaacaggagactataagcctttgtttagtcgtctcaaagagaattatatatttaccggtcccgttccaatatgtatcaaagatatagatcaccctaatcttagtagagcaagaagtccatccgattatgagacattagctaatattagtactatattgtactttaccaagtatgatccggtattaatgtttttattgttttacgtacctgggtattcaattactacaaaaattactccagccgtagaatatctaatggataaactgaatctaacaaagagcgacgtacaactgttgtaaattattttatgcttcgtaaaatgtaggttttgaaccaaacattctttcaaagaatgagatgcataaaactttattatccaatagattgactatttcggacgtcaatcgtttaaagtaaacttcgtaaaatattctttgatcactgccgagtttaaaacttctatcgataattgtttcatatgttttaatatttacaagttttttggtccatggtccattaggacaaatatatgcaaaataatatcgttctccaagttctatagtctctggattatttttattatattcagtaaccaaatacatattagggttatctgcggatttataatttgagtgatgcattcgactcaacataaataattctagaggagacgatctactatcaaattcggatcgtaaatctgtttctaaagaacggagaatatctatacatacctgattagaattcatccgtccttcagacaacatctcagacagtctggtcttgtatgtcttaatcatattcttatgaaacttggaaacatctcttctagtttcactagtacctttattaattctctcaggtacagattttgaattcgacgatgccgagtatttcatcgttgtatatttcttcttcgattgcataatcagattcttatataccgcctcaaactctattttaaaattattaaacaatactctattattaatcagtcgttctaactctttcgctatttctatagacttatctacatcttgactgtctatctctgtaaacacggagtcggtatctccatacacgctacgaaaacgaaatctgtaatctataggcaacgatgttttcacaatcggattaatatctctatcgtccatataaaatggattacttaatggattggcaaaccgtaacataccgttagataactctgctccatttagtaccgattctagatacaagatcattctacgtcctatggatgtgcaactcttagccgaagcgtatgagtatagagcactatttctaaatcccatcagaccatatactgagttggctactatcttgtacgtatattgcatggaatcatagatggccttttcagttgaactggtagcctgttttagcatctttttatatctggctctctctgccaaaaatgttcttaatagtctaggaatggttccttctatcgatctatcgaaaattgctatttcagagatgaggttcggtagtctaggttcacaatgaaccgtaatatatctaggaggtggatatttctgaagcaatagctgattatttatttcttcttccaatctattggtactaacaacgacaccgactaatgtttccggagatagatttccaaagatacacacattaggatacagactgttataatcaaagattaatacattattactaaacattttttgttttggagcaaataccttaccgccttcataaggaaacttttgttttgtttctgatctaactaagatagttttagtttccaacaatagctttaacagtggacccttgatgactgtactcgctctatattcgaataccatggattgaggaagcacatatgttgacgcacccgcgtctgtttttgtttctactccataatactcccacaaatactgacacaaacaagcatcatgaatacagtatctagccatatctaaagctatgtttagattataatccttatacatctgagctaaatcaacgtcatcctttccgaaagataatttatatgtatcattaggtaaagtaggacataatagtacgactttaaatccattttcccaaatatctttacgaattactttacatataatatcctcatcaacagtcacataattacctgtggttaaaacctttgcaaatgcagcggctttgcctttcgcgtctgtagtatcgtcaccgatgaacgtcatttctctaactcctctatttaatactttacccatgcaactgaacgcgttcttggatatagaatccaatttgtacgaatccaatttttcaaatttttgaatgaatgaatatagatcgaaaaatatagttccattattgttattaacgtgaaacgtagtattggccatgccgcctactcccttatgactagactgatttctctcataaatacagagatgtacagcttcctttttgtccggagatctaaagataatcttctctcctgttaataactctagacgattagtaatatatctcagatcaaagttatgtccgttaaaggtaacgacgtagtcgaacgttagttccaacaattgtttagctattcgtaacaaaactatttcagaacataaaactagttctcgttcgtaatccatttccattagtgactgtatcctcaaacatcctctatcgacggcttcttgtatttcctgttccgttaacatctcttcattaatgagcgtaaacaataatcgtttaccacttaaatcgatataacagtaacttgtatgcgagattgggttaataaatacagaaggaaacttcttatcgaagtgacactctatatctagaaataagtacgatcttgggatatcgaatctaggtatttttttagcgaaacagttacgtggatcgtcacaatgataacatccattgttaatctttgtcaaatattgctcgtccaacgagtaacatccgtctggagatatcccgttagaaatataaaaccaactaatattgagaaattcatccatggtggcattttgtatgctgcgtttctttggctcttctatcaaccacatatctgcgacggagcattttctatctttaatatctagattataacttattgtctcgtcaatgtctatagttctcatctttcccaacggcctcgcattaaatggaggaggagacaatgactgatatatttcgtccgtcactacgtaataaaagtaatgaggaaatcgtataaatacggtctcaccatttcgacatctggatttcagatataaaaatctgttttcaccgtgactttcaaaccaattaatgcaccgaacatccatttatagaatttagaaatatattttcatttaaatgaatcccaaacattggggaagagccgtatggaccattatttttatagtactttcgcaagcgggtttagacggcaacatagaagcgtgtaaacgaaaactatatactatagttagcactcttccatgtcctgcatgtagacggcacgcgactatcgctatagaggacaataatgtcatgtctagcgatgatctgaattatatttattattttttcatcagattatttaacaatttggcatctgatcccaaatacgcgatcgatgtgacaaaggttaaccctttataaacttaacccattataaaacttatgattagtcacgactgaaataaccgcgtgattattttttggtataattctacacggcatggtttctgtgactatgaattcaacccccgttacattagtgaaatctttaacaaacagcaagggttcgtcaaagacataaaactcattgtttacgatcgaaatagaccccctatcacacttaaaataaaaaatatccttatcctttaccaccaaataaaattctgattggtcaatgtgaatgtattcacttaacagttccacaaatttatttattaactccgaggcacatacatcgtcggtattttttatggcaaactttactcttccagcatccgtttctaaaaaaatattaacgagttccatttatatcatccaatattattgaaatgacgttgatggacagatgatacaaataagaaggtacggtacctttgtccaccatctcctccaattcatgctctattttgtcattaactttaatgtatgaaaacagtacgccacatgcttccatgacagtgtgtaacactttggatacaaaatgtttgacattagtataattgtccaagactgtcaatctataatagatagtagctataatatattctatgatggtattgaagaagatgacaaccttggcatattgatcatttaacacagacatggtatcaacagatagcttgaatgaaagagaatcagtaattggaataagcgtcttctcgatagagtgtccgtataccaacatgtctgatattttgatgtattccattaaattatttagttttttctttttattttcgttaaacagcatttctgtcaacggaccccaacatcgttgaccgattaagttttgattgatttttccgtgtaatgcgtatctagtcagatcgtatagcctatccaataatccatcgtctgtgtgtagatcacatcgtacactttttaattctctatagaagagcgacagacatctggagcaattacagacagcaatttctttattctctacagatgtaagatacttgaagacattcctatgatgatgcagaattttggataacacggtattgatggtatctgttaccataattcctttgatggctgatagtgtcagagcacaagatttccaatctttgacaatttttagcaccattatctttgttttgatatctatatcagacagcatggtgcgtctgacaacacagggattaagacggaaagatgaaatgattctctcaacatcttcaatagataccttgctattttttctggcattatctatatgtgcgagaatatcctctagagaatcagtatcctttttgatgatagtggatctcaatgacatgggacgtctaaaccttcttattctatcaccagattgcatggtgatttgtcttctttcttttatcataatgtaatctctaaattcatcggcaaattgtctatatctaaaatcataatatgagatgtttacctctacaaatatctgttcgtccaatgttagagtatttacatcagttttgtattccaaattaaacatggcaacggatttaattttatattcctctattaagtcctcgtcgataataacagaatgtagataatcatttaatccatcgtacatggttggaagatgcttgttgacaaaatctttaattgtcttgatgaaggtgggactatatctaacatcttgattaataaaatttataacattgtccataggatactttgtaactagttttatacacatctcttcatcggtaagtttagacagaatatcgtgaacaggtggtatattatattcatcagatatacgaagaacaatgtccaaatctatattgtttaatatattatatagatgtagcgtagctcctacaggaatatctttaactaagtcaatgatttcatcaaccgttagatctattttaaagttaatcatataggcattgatttttaaaaggtatgtagccttgactacattctcattaattaaccattccaagtcactgtgtgtaagaagattatattctatcataagcttgactacatttggtcccgataccattaaagaattcttatgatataaggaaacagcttttaggtactcatctactctacaagaattttggagagccttaacgatatcagtgacgtttattatttcaggaggaaaaaacctaacattgagaatatcggaattaatagcttccagatacagtgattttggcaatagtccgtgtaatccataatccagtaacacgagctggtgcttgctagacaccttttcaatgtttaatttttttgaaataagctttgataaagccttcctcgcaaattccggatacatgaacatgtcggcgacatgattaagtattgttttttcattattttctcaataccccaatagatgatagaatatcacccaatgcgtccatgttgtctatttccaacaggtcgctatatccaccaatagaagtttttccaaaaaagattctaggaacagttctaccaccagtaatttgttcaaaatagtcacgcaattcattttcgggtttaaattctttaatatcgacaatttcatacgctcctcttttgaaactaaacttatttagaatatccagtgcatttctacaaaaaggacatgtatacttgacaaaaattgtcactttgttattggccaacctttgttgtacaaattcctcggccattttaatatttaagtgatataaaactatctcgacttatttaactctttagtcgagatatatggacgcagatagctatatgatagccaactacagaaggcaaacgctataaaaaacataattacgacgagcatatttataaatatttttattcagcattacttgatatagtaatattaggcacagtcaaacattcaaccactctcgatacattaactctctcattttctttaacaaattctgcaatatcttcgtaaaaagattcttgaaactttttagaatatctatcgactctagatgaaatagcgttcgtcaacatactatgttttgtatacataaaggcgcccattttaacagtttctagtgacaaaatgctagcgatcctaggatcctttagaatcacatagattgacgattcgtctctcttagtaactctagtaaaataatcatacaatctagtacgcgaaataatattatccttgacttgaggagatctaaacaatctagttttgagaacatcgataagttcatcgggaatgacatacatactatctttaatagaactcttttcatccagttgaatggattcgtccttaaccaactgattaatgagatcttctattttatcattttccagatgatatgtatgtccattaaagttaaattgtgtagcgcttctttttagtctagcagccaatactttaacatcactaatatcgatatacaaaggagatgatttatctatggtattaagaattcgtttttcgacatctgtcaaaaccaattcctttttgcctgtatcatccagttttccatcctttgtaaagaaattattttctactagactattaataagactgataaggattcctccataattgcacaatccaaactttttcacaaaactagactttacaagatctacaggaatgcgtacttcaggttttttagcttgtgattttttcttttgcggacattttcttgtgaccaactcatctaccatttcattgattttagcagtgaaataagctttcaatgcacgggcactgatactattgaaaacgagttgatcttcaaattccgccatttaagttcaccaaacaacttttaaatacaaatatatcaatagtagtagaataagaactataaaaaaaataataattaaccaataccaaccccaacaaccggtattattagttgatgtgactgttttctcatcacttagaacagatttaacaatttctataaagtctgtcaaatcatcttccggagaccccataaatacaccaaatatagcggcgtacaacttatccatttatacattgaatattggcttttctttatcgctatcttcatcatattcatcatcaatatcaacaagtcccagattacgagccagatcttcttctacattttcagtcattgatacacgttcactatctccagagagtccgataacgttagccaccacttctctatcaatgattagtttcttgagcgcgaaagtaatttttgtttccgttccggatctatagaagacgataggtgtgataattgccttggccaattgtctttctcttttactgagtgattctagttcaccttctatagatctgagaatggatgattctccagtcgaaacatattctaccatggatccgtttaatttgttgatgaagatggattcatccttaaatgttttctctgtaatagtttccaccgaaagactatgcaaagaatttggaatgcgttccttgtgcttaatgtttccatagacggcttctagaagttgatacaacataggactagccgcggtaacttttatttttagaaagtatccatcgcttctatcttgtttagatttatttttataaagtttagtctctccttccaacataataaaagtggaagtcatttgactagataaactatcagtaagttttatagagatagacgaacaattagcgtattgagaagcatttagtgtaacgtattcgatacattttgcattagatttactaatcgattttgcatactctataacacccgcacaagtctgtagagaatcgctagatgcagtaggtcttggtgaagtttcaactctcttcttgattaccttactcatgattaaacctaaataattgtactttgtaatataatgatatatattttcactttatctcatttgagaataaaaatgtttttgtttaaccactgcatgatgtacagatttcggaatcgcaaaccaccagtggttttattttatccttgtccaatgtgaattgaatgggagcggatgcgggtttcgtacgtagatagtacattcccgtttttagaccgagactccatccgtaaaaatgcatactcgttagtttggaataactcggatctgctatatggatattcatagattgactttgatcgatgaaggctcccctgtctgcagccatttttatgatcgtcttttgtggaatttcccaaatagttttataaactcgcttaatatcttctggaaggtttgtattctgaatggatccaccatctgccataatcctattcttgatctcatcattccataattttctctcggttaaaactctaaggagatgcggattaactacttgaaattctccagacaatactctccgagtgtaaatattactggtatacggttccaccgactcattatttcccaaaatttgagcagttgatgcagtcggcataggtgccaccaataaactatttctaagaccgtatgttctgattttatcttttagaggttcccaattccaaagatccgacggtacaacattccaaagatcatattgtagaataccgttactggcgtacgatcctacatatgtatcgtatggtccttccttctcagctagttcacaactcgcctctaatgcaccgtaataaatggtttcgaagatcttcttatttagatcttgtgcttccaggctatcaaatggataatttaagagaataaacgcgtccgctaatccttgaacaccaataccgataggtctatgtctcttattagagatttcagcttctggaataggataataattaatatctataattttattgagatttctgacaattactttgaccacatccttcagtttgagaaaatcaaatcgcccatctattacaaacatgttcaaggcaacagatgccagattacaaacggctacctcattagcatccgcatattgtattatctcagtgcaaagattactacacttgatagttcctaaattttgttgattactctttttgttacacgcatccttataaagaatgaatggagtaccagtttcaatctgagattctataatcgctttccagacgactcgagcctttattatagatttgtatctcctttctctttcgtatagtgtatacaatcgttcgaactcgtctccccaaacattgtccaatccaggacattcatccggacacatcaacgaccactctccgtcatccttcactcgtttcataaagagatcaggaatccaaagagctataaatagatctctggttctatgttcctcgtttcctgtattctttttaagatcgaggaacgccataatatcagaatgccacggttccaagtatatggccataactccaggccgtttgtttcctccctgatctatgtatctagcggtgttattataaactctcaacattggaataataccgtttgatataccattggtaccggagatatagcttccactggcacgaatattactaattgatagacctattccccctgccattttagagattaatgcgcatcgttttaacgtgtcatagataccctctatgctatcatcgatcatgttaagtagaaaacagctagacatttggtgacgactagttcccgcattaaataaggtaggagaagcgtgcgtaaaccatttttcagaaagtagattgtacgtctcaatagctgagtctatatcccattgatgaattcctactgcgacacgcattaacatgtgctgaggtctttcaacgatcttgttgtttattttcaacaagtaggatttttccaaagttttaaaaccaaaatagttgtatgaaaagtctcgttcgtaaataataaccgagttgagtttatccttatatttgttaactatatccatggtgatacttgaaataatcggagaatgtttcccatttttaggattaacatagttgaataaatcctccatcacttcactaaatagtttttttgtttccttgtgtagatttgatacggctattctggcggctagaatggcataatccggatgttgtgtagtacaagtggctgctatttcggctgccagagtgtccaattctaccgttgttactccattatatattccttgaataaccttcatagctattttaataggatctatatgatccgtgtttaagccataacataattttctaatacgagacgtgattttatcaaacatgacattttccttgtatccatttcgtttaatgacaaacatttttgttggtgtaataaaaaaattatttaacttttcattaatagggatttgacgtatgtagcgtacaaaatgatcgttcctggtatatagataaagagtcctatatatttgaaaatcgttacggctcgattaaactttaatgattgcatagtgaatatatcattaggatttaactccttgactatcatggcggcgccagaaattaccatcaaaagcattaatacagttatgccgatcgcagttaaaacggttatagcatccaccatttatatctaaaaattagatcaaagaatatgtgacaaagtcctagttgtatactgagaattgacgaaacaatgtttcttacatatttttttcttattagtaactgacttaatagtaggaactggaaagctagacttgattattctataagtatagatacccttccagataatgttctctttgataaaagttccagaaaatgtagaattttttaaaaagttatcttttgctattaccaagattgtgtttagacgcttattattaatatgagtgatgaaatccacaccgcctctagatatcgcctttatttccacattagatggtaaatccaatagtgaaactatctttttaggaatgtatggactcgcgtttagaggagtgaacgtcttgggcgtcggaaaggatgattcgtcaaacgaataaacaatttcacaaatggatgttaatgtattagtaggaaatttcttgacgctattggaattgaagattctaatggatgatgttctacctatttcatccgataacatgttaatttccgacaccaacggttttaatatttcgatgatatacggtagtctctctttcggacttatatagcttattccacaatacgagtcattatatactccaaaaaacaaaataactagtataaaatctgtatcgaatgggaaaaacgaaattatcgacataggtatagaatccggaacattgaacgtattaatacttaattctttttctgtggtaagtaccgataggttattgacattgtatggttttaaatattctataacttgagacttgatagatattagtgatgaattgaaaattatttttatcaccacgtgtgtttcaggatcatcgtcgacgcctgtcaaccaaccgaatggagtaaaataaatatcattaatatatgctctagatattagtatttttattaatcctttgattatcatcttctcgtaggcgaatgattccatgatcaagagtgatttgagaacatcctccggagtattaatgggcttagtaaacagtccatcgttgcaataataaaagttatccaagttaaaggatattatgcattcgtttaaagatatcacctcatctgacggagacaattttttggtaggttttagagactttgaagctacttgtttaacaaagttattcatcgtcgtctactattctatttaattttgtagttaatttatcacatatcacattaattgactttttggtccatttttccatacgtttatattcttttaatcctgcgttatccgtttccgttatatccagggatagatcttgcaagttaaatagaatgctcttaaataatgtcattttcttatccgctaaaaatttaaagaatgtataaacctttttcagagatttgaaactcttaggtggtgtcctagtacacaatatcataaacaaactaataaacattccacattcagattccaacagctgattaacttccacattaatacagcctattttcgctccaaatgtacattcgaaaaatctgaataaaacatcgatgtcacaatttgtattatccaatacagaatgtttgtgattcgtgttaaaaccatcggagaaggaatagaaataaaaattattatagtggtggaattcagttggaatattgcctccggagtcataaaaggatactaaacattgttttttatcataaattacacatttccaatgagacaaataacaaaatccaaacattacaaatctagaggtagaacttttaattttgtctttaagtatatacgataagatatgtttattcataaacgcgtcaaatttttcatgaatcgctaaggagtttaagaatctcatgtcaaattgtcctatataatccacttcggatccataagcaaactgagagactaagttcttaatacttcgattgctcatccaggctcctctctcaggctctattttcatcttgacgacctttggattttcaccagtatgtattcctttacgtgataaatcatcgattttcaaatccatttgtgagaagtctatcgccttagatactttttcccgtagtcgaggtttaaaaaaatacgctaacggtatactagtaggtaactcaaagacatcatatatagaatggtaacgcgtctttaactcgtcggttaactctttcttttgatcgagttcgtcgctactattgggtctgctcaggtgccccgactctactagttccaacatcataccgataggaatacaagacactttgccggcggttgtagatttatcatatttttccactacatatccgttacaatttgttaaaaatttagatacatctatattgctacataatccagctagtgaatatatatgacataataaattggtaaatcctagttctggtattttactaattactaaatctgtatatctttccatttatcatggaaaagaatttaccagatatcttcttttttccaaactgcgttaatgtattctcttacaaatattcacaagatgaattcagtaatatgagtaaaacggaacgtgatagtttctcattggccgtgtttccagttataaaacatagatggcataacgcacacgttgtaaaacataaaggaatatacaaagttagtacagaagcacgtggaaaaaaagtatctcctccatcactaggaaaacccgcacacataaacctaaccgcgaagcaatatatatacagtgaacacacaataagctttgaatgttatagttttctaaaatgtataacaaatacagaaatcaattcgttcgatgagtatatattaagaggactattagaagctggtaatagtttacagatattttccaattccgtaggtaaacgaacagatactataggtgtactagggaataagtatccatttagcaaaattccattggcctcattaactcctaaagcacaacgagagatattttcagcgtggatttctcatagacctgtagttttaactggaggaactggagtgggtaagacgtcacaggtacccaagttattgctttggtttaattatttatttggtggattctctactctagataaaatcactgactttcacgaaagaccagtcattctatctcttcctaggatagctttagttagattgcatagcaataccattttaaaatcattgggatttaaggtactagatggatctcctatttctttacggtacggatctataccggaagaattaataaacaaacaaccaaaaaaatatggaattgtattttctacccataagttatctctaacaaaactatttagttatggcactcttattatagacgaagttcatgagcatgatcaaataggagatattattatagcagtagcgagaaagcatcatacgaaaatagattctatgtttttaatgactgccacgttagaggatgacagggaacggctaaaagtatttttacctaatcccgcatttatacatattcctggagatacactgtttaaaattagcgaggtatttattcataataagataaatccatcttccagaatggcatacatagaagaagaaaagagaaatttagttactgctatacagatgtatactcctcctgatggatcatccggtatagtctttgtggcatccgttgcacagtgtcacgaatataaatcatatttagaaaaaagattaccgtatgatatgtatattattcatggtaaggtcttagatatagacgaaatattagaaaaagtgtattcatcacctaatgtatcgataattatttctactccttatttggaatccagcgttactatacgcaatgttacacacatttatgatatgggtagagtttttgtccccgctccttttggaggatcgcaacaatttatttctaaatctatgagagatcaacgaaaaggaagagtaggaagagttaatcctggtacatacgtctatttctatgatctgtcttatatgaagtctatacagcgaatagattcagaatttctacataattatatattgtacgctaataagtttaatctaacactccccgaagatttgtttataatccctacaaatttggatattctatggcgtacaaaggaatatatagactcgttcgatattagtacagaaacatggaataaattattatccaattattatatgaagatgatagagtatgctaaactttatgtactaagtcctattctcgctgaggagttggataactttgagaggacgggagaattaactagtattgtacgagaagccattttatctctaaatttacaaattaagattttaaattttaaacataaagatgatgatacgtatatacacttttgtaaaatattattcggtgtctataacggaacaaacgctactatatattatcatagacctctaacgggatatatgaatatgatttcagatactatatttgttcctgtagataataactaaaaatcaaactctaatgaccacatctttttttagagatgaaaaattttccacatctccttttgtagacacgactaaacattttgcagaaaaaagtttattagtgtttagataatcgtatacttcatcagtgtagatagtaaatgtgaacagataaaaggtattcttgctcaatagattggtaaattccatagaatatattaatcctttcttcttgagatcccacatcatttcaaccagagacgttttatccaatgatttacctcgtactataccacatacaaaactagattttgcagtgacgtcgtacctggtattcctaccaaacaaaattttacttttagttcttttagaaaattctaaggtagaatctctatttgccaatatgtcatctatggaattaccactagcaaaaaatgatagaaatatatattgatacatcgcagctggttttgatctactatactttaaaaacgaatcagattccataattgcctgtatatcatcagctgaaaaactatgttttacacgtattccttcggcatttctttttaatgatatatcttgtttagacaatgataaagttatcatgtccatgagagacgcgtctccgtatcgtataaatatttcattagatgttagacgcttcattaggggtatacttctataaggtttcttaatcagtccatcattggttgcgtcaagaactactatcggatgttgttgggtatctctagtgttacacatggccttactaaagtttgggtaaataactatgatatctctattaattatagatgcatatatttcattcgtcaaggatattagtatcgacttgctatcgtcattaatacgtgtaatgtaatcatataaatcatgcgatagccaaggaaaatttaaatagatgttcatcatataatcgtcgctataattcatattaatacgttgacattgactaatttgtaatatagcctcgccacgaagaaagctctcgtattcagtttcatcgataaaggataccgttaaatataactggttgccgatagtctcatagtctattaagtggtaagtttcgtacaaatacagaatccctaaaatattatctaatgttggattaatctttaccataactgtataaaatggagacggagtcataactattttaccgtttgtacttactggaatagatgaaggaataatctccggacatgctggtaaagacccaaatgtctgtttgaagaaatccaatgttccaggtcctaatctcttaacaaaaattacgatattcgatcccgatatcctttgcattctatttaccagcatatcacgaactatattaagattatctatcatgtctattctcccaccgttatataaatcgcctccgctaagaaacgttagtatatccatacaatggaatacttcatttctaaaatagtattcgttttctaattctttaatgtgaaatcgtatactagaaagggaaaaattatctttgagttttccgttagaaaagaaccacgaaactaatgttctgattgcgtccgattccgttgctgaattaatggatttacaccaaaaactcatataacttctagatgtagaagcattcgctaaaaaattagtagaatcaaaggatataagtagatgttccaacaagtgagcaattcccaagatttcatctatatcattctcgaatccgaaattagaaattcccaagtagatatcctttttcatccgatcgttgatgaaaatacgaactttattcggtaagacaatcatttactaaggagtaaaataggaagtaatgttcgtatgtcgttatcatcgtataaattaaaggtgtgttttttaccattaagtgacattataattttaccaatattggaattataatataggtgtatttgcgcactcgcgacggttgatgcatcggtaaatatagctgtatctaatgttctagtcggtatttcatcatttcgctgtctaataatagcgttttctctatctgtttccattacagctgcctgaagtttattggtcggataatatgtaaaataataagaaatacatacgaataacaaaaataaaataagatataataaagatgccatttagagatctaattttgtttaacttgtccaaattcctacttacagaagatgaggaatcgttggagatagtgtcttccttatgtagaggatttgaaatatcttataatgacttgataacttactttccagataggaaataccataaatatatttataaagtatttgaacatgtagatttatcggaggaattaagtatggaattccatgatacaactctgagagatttagtctatcttagattgtacaagtattccaagtgtatacggccgtgttataaattaggagataatctaaaaggcatagttgttataaaggacaggaatatttatattagggaagcaaatgatgacttgatagaatatctcctcaaggaatacactcctcagatttatacatattctaatgagcgcgtccccataactggttcaaaattaattctttgtggattttctcaagttacatttatggcgtatacaacgtcgcatataacaacaaataaaaaggtagatgttctcgtttccaaaaaatgtatagatgaactagtcgatccaataaattatcaaatacttcaaaatttatttgataaaggaagcggaacaataaacaaaatactcaggaagatattttattcggtaacaggtggccaaactccataggtagctttttctatttcggattttagaatttccaaattcaccagcgatttatcggttttggtgaaatccaaggatttattaatgtccacaaatgccatttgttttgtctgtggattgtatttgaaaatggaaacgatgtagttagatagatgcgctgcgaagtttcctattagggttccgcgcttcacgtcacccagcatacttgaatcaccatcctttaaaaaaaatgataagatatcaacatggagtatatcatactcggattttaattcttctactgcatcactgacattttcacaaatactacaatacggtttaccgaaaataatcagtacgttcttcatttatgggtatcaaaaacttaaaatcgttactgctggaaaataaatcactgacgatattagatgataatttatacaaagtatacaatggaatatttgtggatacaatgagtatttatatagccgtcgccaattgtgtcagaaacttagaagagttaactacggtattcataaaatacgtaaacggatgggtaaaaaagggagggcatgtaaccctttttatcgatagaggaagtataaaaattaaacaagacgttagagacaagagacgtaaatattctaaattaaccaaggacagaaaaatgttagaattagaaaagtgtacatccgaaatacaaaatgttaccggatttatggaagaagaaataaaggcagaaatgcaattaaaaatcgataaactcacatttcaaatatatttatctgattctgataacataaaaatatcattgaatgagatactaacacatttcaacaataatgagaatgttacattattttattgtgatgaacgagacgcagaattcgttatgtgtctcgaggctaaaacacatttctctaccacaggagaatggccgttgataataagtaccgatcaggatactatgctatttgcatctgctgataatcatcctaagatgataaaaaacttaactcaactgtttaaatttgttccctcggcagaggataactatttagcaaaattaacggcgttagtgaatggatgtgatttctttcctggactctatggggcatctataacacccaccaacttaaacaaaatacaattgtttagtgattttacaatcgataatatagtcactagtttggcaattaaaaattattatagaaagactaactctaccgtagacgtgcgtaatattgttacgtttataaacgattacgctaatttagacgatgtctactcgtatattcctccttgtcaatgcactgttcaagaatttatattttccgcattagatgaaaaatggaatgaatttaaatcatcttatttagaaagcgtgccgttaccctgccaattaatgtacgcgttagaaccacgcaaggagattgatgtttcagaagttaaaactttatcatcttatatagatttcgaaaatactaaatcagatatcgatgttataaaatctatatcctcgatcttcggatattctaacgaaaactgtaacacgatagtattcggcatctataaggataatttactactgagtataaataattcattttactttaacgatagtctgttaataaccaatactaaaagtgataatataataaatataggttactagattaaaaatggtgttccaactcgtgtgctctacatgcggtaaagatatttctcacgaacgatataaattgattatacgaaaaaaatcattaaaggatgtactcgtcagtgtaaagaacgaatgttgtaggttaaaattatctacacaaatagaacctcaacgtaacttaacagtgcaacctctattggatataaactaatatggatccggttaattttatcaagacatatgcgcctagaggttctattatttttattaattataccatgtcattaacaagtcatttgaatccatcgatagaaaaacatgtgggtatttattatggtacgttattatcggaacacttggtagttgaatctacctatagaaaaggagttcgaatagtcccattggatagtttttttgaaggatatcttagtgcaaaagtatacatgttagagaatattcaagttatgaaaatagcagctgatacgtcattaactttattgggtattccgtatggatttggtcataatagaatgtattgttttaaattggtagctgactgttataaaaatgccggtattgatacatcgtctaaacgaatattgggcaaagatatttttctgagccaaaacttcacagacgataatagatggataaagatatatgattctaataatttaacattttggcaaattgattaccttaaagggtgagttaatatgcataactactcctccgttgttttttccctcgttctttttcttaacgttgtttgccatcactctcataatgtaaagatattctaaaatggtaaacttttgcatatcggacgcagaaattggtataaatgttgtaattgtattatttcccgtcaatggactagtcacagctccatcagttttatatcctttagagtatttctcactcgtgtctaacattctagagcattccatgatctgtttatcgttgatattggccggaaagatagattttttattttttattatattactattggcaattgtagatataacttctggtaaatatttttctaccttttcaatctcttctattttcaagccggctatatattctgctatattgttgctagtatcaataccttttctggctaagaagtcatatgtggtattcactatatcagttttaactggtagttccattagcctttccacttctgcagaataatcagaaattggttctttaccagaaaatccagctactataataggctcaccgatgatcattggcaaaatcctatattgtaccagattaatgagagcatatttcatttccaataattctgctagttcttgagacattgatttatttgatgaatctagttggttctctagatactctaccatttctgccgcatacaataacttgttagataaaatcagggttatcaaagtgtttagcgtggctagaatagtgggcttgcatgtattaaagaatgcggtagtatgagtaaaccgttttaacgaattatatagtctccagaaatctgtggcgttacatacatgagccgaatgacatcgaagattgtccaatatttttaatagctgctctttgtccattatttctatatttgactcgcaacaattgtagataccattaatcaccgattcctttttcgatgccggacaatagcacaattgtttagctttggactctatgtattcagaattaatagatatatctctcaatacagattgcactatacattttgaaactatgtcaaaaattgtagaacgacgctgttctgcagccatttaactttaaataatttacaaaaatttaaaatgagcatccgtataaaaatcgataaactgcgccaaattgtggcatatttttcagagttcagtgaagaagtgtctataaatgtagactcgacggatgagttaatgtatatttttgccgccttgggcggatctgtaaacatttgggcaattatacctctaagtgcatcagtgttttaccgaggagccgaaaatattgtgtttaatcttcctgtgtccaaggtaaaatcgtgtttgtgtagttttcacaatgatgccatcatagatatagaacctgatctggaaaataatctagtaaaactttctagttatcatgtagtaagtgtcgattgtaacaaggaactgatgcctattaggacagatactactatttgtctaagtatagatcaaaagaaatcttacgtgtttaattttcacaagtatgaagaaaaatgttgtggtagaaccgtcattcatctagaatggttgttgggctttatcaagtgtattagtcagcatcagcatctggctattatgtttaaagatgacaatattattatgaagactcctggtaatactgatgcattttccagggaatattctatgactgaatgttctcaagaactacaaaagttttctttcaaaatagctatctcgtctctcaacaaactacgaggattcaaaaagagagtcaatgtttttgaaactagaatcgtaatggataatgacgataacattctaggaatgttgttttcggatagagttcaatcctttaagatcaacatctttatggcgtttttagattaatactttcaatgagataaatatgggtggcggagtaagtgttgagctccctaaacgggatccgcctccgggagtacccactgatgagatgttattaaacgtggataaaatgcatgacgtgatagctcccgctaagcttttagaatatgtgcatataggaccactagcaaaagataaagaggataaagtaaagaaaagatatccagagtttagattagtcaacacaggacccggtggtctttcggcattgttaagacaatcgtataatggaaccgcacccaattgctgtcgcacttttaatcgtactcattattggaagaaggatggaaagatatcagataagtatgaagagggtgcagtattagaatcgtgttggccagacgttcacgacactggaaaatgcgatgttgatttattcgactggtgtcagggggatacgttcgatagaaacatatgccatcagtggatcggttcagcctttaataggagtgatagaactgtagagggtcaacaatcgttaataaatctgtataataagatgcaaacattatgtagtaaagatgctagtgtaccaatatgcgaatcatttttgcatcatttacgcgcacacaatacagaagatagcaaagagatgatcgattatattctaagacaacagtctgcggactttaaacagaaatatatgagatgtagttatcccactagagataagttagaagagtcattaaaatatgcggaacctcgagaatgttgggatccagagtgttcgaatgccaatgttaatttcttactaacacgtaattataataatttaggactttgcaatattgtacgatgtaataccagcgtgaacaacttacagatggataaaacttcctcattaagattgtcatgtggattaagcaatagtgatagattttctactgttcccgtcaatagagcaaaagtagttcaacataatattaaacattcgttcgacctaaaattgcatttgatcagtttattatctcttttggtaatatggatactaattgtagctatttaaatgggtgccgcggcaagcatacagacgacggtgaatacactcagcgaacgtatctcgtctaaattagaacaagaagcgaacgctagtgctcaaacaaaatgtgatatagaaatcggaaatttttatatccgacaaaaccatggatgtaacctcactgttaaaaatatgtgctctgcggacgcggatgctcagttggatgctgtgttatcagccgctacagaaacatatagtggattaacaccggaacaaaaagcatacgtgccagctatatttactgctgcgttaaacattcagacgagtgtaaacactgttgttagagattttgaaaattatgtgaaacagacttgtaattctagcgcggtcgtcgataacaaattaaagatacaaaacgtaatcatagatgaatgttacggagccccaggatctccaacaaatttggaatttattaatacaggatctagcaaaggaaattgtgccattaaagcgttgatgcaattgacgactaaggccactactcaaatagcacctagacaagttgctggtacaggagttcagttttatatgattgttatcggtgttataatattggcagcgttgtttatgtactatgccaagcgtatgttgttcacatccaccaatgataaaatcaaacttattttagccaataaggaaaacgtccattggactacttacatggacacattctttagaacttctccgatggttattgctaccacggatatgcaaaactgaaaatatattgataatattttaatagattaacatggaagttatcgctgatcgtctagacgatatagtgaaacaaaatatagcggatgaaaaatttgtagattttgttatacacggtctagagcatcaatgtcctgctatacttcgaccattaattaggttgtttattgatatactattatttgttatagtaatttatatttttacggtacgtctagtaagtagaaattatcaaatgttgttggtggtgctagtcatcacattaactattttttattactttatactataatagtactagactgacttctaacaaacatctcacctgccataaataaatgcttgatattaaagtcttctatttctaacactattccatctgtggaaaataatactctgacattatcgctaattgacacatcggtgagtgatatgcctataaagtaataatcttctttgggcacatataccagtgtaccaggttctaacaacctatttactggtgctcctgtagcatactttttctttaccttgagaatatccatcgtttgcttggtcaatagcgatatgtgattttttatcaaccactcaaaaaagtaattggagtgttcatatcctctacgggctattgtctcatggccgtgtatgaaatttaagtaacacgactgtggtagatttgttctatagagccgattgccgcaaatagatagaactaccaatatgtctgtacaaatgttaaacattaattgattaacagaaaaaacaatgttcgttctgggaatagaaaccagatcaaaacaaaattcgttagaatatatgccacgtttatacatggaatataaaataactacagtttgaaaaataacagtatcatttaaacatttaacttgcggggttaatctcacaactttactgtttttgaactgttcaaaatatagcatcgatccgtgagaaatacgtttagccgcctttaatagaggaaatcccaccgcctttctggatctcaccaacgacgatagttctgaccagcaactcatttcttcatcatccacctgttttaacatataataggcaggagatagatatccgtcattgcaatattccttctcgtaggcacacaatctaatattgataaaatctccattctcttctctgcatttattatcttgtctcggtggctgattaggctgtggtcttggtttaggccttggtctatcgttgttgaatctattttggtcattaaatctttcatttcttcctggtatatttctatcacctcgtttggttggatttttgtctatattatcgtttgtaacatcggtacgggtattcatttatcacaaaaaaaacttctctaaatgagtctactgctagaaaacctcatcgaagaagataccatattttttgcaggaagtatatctgagtatgatgatttacaaatggttattgccggcgcaaaatccaaatttccaagatctatgctttctatttttaatatagtacctagaacgatgtcaaaatatgagttggagttgattcataacgaaaatatcacaggagcaatgtttaccacaatgtataatataagaaacaatttgggtctaggagatgataaactaactattgaagccattgaaaactatttcttggatcctaacaatgaagttatgcctcttattattaataatacggatatgactgccgtcattcctaaaaaaagtggtaggagaaagaataagaacatggttatcttccgtcaaggatcatcacctatcttgtgtattttcgaaactcgtaaaaagattaatatttataaagaaaatatggaatccgcgtcgactgagtatacacctatcggagacaacaaggctttaatatctaaatatgcgggaattaatgtcctgaatgtgtattctccttccacatccataagattgaatgccatttacggattcaccaataaaaataaactagagaaacttagtactaataaggaactagaatcgtatagttctagccctcttcaagaacccattaggttaaatgattttctgggactattggaatgtgttaaaaagaatattcctctaacagatattccgacaaaggattgattactataaatggagaatgttcctaatgtatactttaatcctgtgtttatagagcccacgtttaaacattctttattaagtgtttataaacacagattaatagttttatttgaagtattcgttgtattcattctaatatatgtattttttagatctgaattaaatatgttcttcatgcctaaacgaaaaatacccgatcctattgatagattacgacgtgctaatctagcgtgtgaagacgataaattaatgatctatggattaccatggatgacaactcaaacatctgcgttatcaataaatagtaaaccgatagtgtataaagattgtgcaaagcttttgcgatcaataaatggatcacaaccagtatctcttaacgatgttcttcgcagatgatgattcattttttaagtatttggctagtcaagatgatgaatcttcattatctgatatattgcaaatcactcaatatctagactttctgttattattattgatccaatcaaaaaataaattagaagctgtgggtcattgttatgaatctctttcagaggaatacagacaattgacaaaattcacagactttcaagattttaaaaaactgtttaacaaggtccctattgttacagatggaagggtcaaacttaataaaggatatttgttcgactttgtgattagtttgatgcgattcaaaaaagaatcctctctagctaccaccgcaatagatcctgttagatacatagatcctcgtcgtgatatcgcattttctaacgtgatggatatattaaagtcgaataaagtgaacaataattaattctttattgtcatcatgaacggcggacatattcagttgataatcggccccatgttttcaggtaaaagtacagaattaattagacgagttagacgttatcaaatagctcaatataaatgcgtgactataaaatattctaacgataatagatacggaacgggactatggacgcatgataagaataattttgaagcattggaagcaactaaactatgtgatgtcttggaatcaattacagatttctccgtgataggtatcgatgaaggacagttctttccagacattgtttaattctgtgagcgtatggcaaacgaaggaaaaatagttatagtagccgcactcgatgggacatttcaacgtaaaccgtttaataatattttgaatcttattccattatctgaaatggtggtaaaactaactgctgtgtgtatgaaatgctttaaggaggcttccttttctaaacgattgggtgaggaaaccgagatagagataataggaggtaatgatatgtatcaatcggtgtgtagaaagtgttacgtcggctcataatattatattttttatctaaaaaactaaaaataaacattgattaaattttaatataatacttaaaaatggatgttgtgtcgttagataaaccgtttatgtattttgaggaaattgataatgagttagattacgaaccagaaagtgcaaatgaggtcgcaaaaaaactgccgtatcaaggacagttaaaactattactaggagaattattttttcttagtaagttacagcgacacggtatattagatggtgccaccgtagtgtatataggatcggctcctggtacacatatacgttatttgagagatcatttctataatttaggagtgatcatcaaatggatgctaattgacggccgccatcatgatcctattttaaatggattgcgtgatgtaactctagtgactcggttcgttgatgaggaatatctacgatccatcaaaaaacaactgcatccttctaagattattttaatttctgatgtaagatccaaacgaggaggaaatgaacctagtacggcggatttactaagtaattacgctctacaaaatgtcatgattagtattttaaaccccgtggcatctagtcttaaatggagatgcccgtttccagatcaatggatcaaggacttttatatcccacacggtaataaaatgttacaaccttttgctccttcatattcagctgaaatgagattattaagtatttataccggtgagaacatgagactgactcgagttaccaaattagacgctgtaaattatgaaaaaaagatgtactaccttaataagatcgtccgtaacaaagtagttgttaactttgattatcctaatcaggaatatgactattttcacatgtactttatgctgaggaccgtgtactgcaataaaacatttcctactactaaagcaaaggtactatttctacaacaatctatatttcgtttcttaaatattccaacaacatcaactgaaaaagttagtcatgaaccaatacaacgtaaaatatctagcaaaaattctatgtctaaaaacagaaatagcaagagatccgtacgcggtaataaatagaaacgtactactgagatatactaccgatatagagtataatgatttagttactttaataaccgttagacataaaattgattctatgaaaactgtgtttcaggtatttaacgaatcatccataaattatactccggttgatgatgattatggagaaccaatcattataacatcgtatcttcaaaaaggtcataacaagtttcctgtaaattttctatacatagatgtggtaatatctgacttatttcctagctttgttagactagatactacagaaactaatatagttaatagtgtactacaaacaggcgatggtaaaaagactcttcgtcttcccaaaatgttagagacggaaatagttgtcaagattctctatcgccctaatataccattaaaaattgttagatttttccgcaataacatggtaactggagtagagatagccgatagatctgttatttcagtcgctgattaatcaattagtagagatgagataagaacattataataatcaataatatatcttatatcttatatcttatatcttatatcttgtttagaaaaatgctaatattaaaatagctaacgctagtaatccaatcggaagccatttgatatctataatagggtatctaatttcctgatttaaatagcggacagctatattctcggtagctactcgtttggaatcacaaacattatttacatctaatttactatctgtaatggaaacgtttcccaatgaaatggtacaatccgatacattgcattttgttatatttttttttaaagaggctggtaacaacgcatcgcttcgtttacatggctcgtaccaacaataatagggtaatcttgtatctattcctatccgtactatgcttttatcaggataaatacatttacatcgtatatcgtctttgttagcatcacagaatgcataaatttgttcgtccgtcatgataaaaatttaaagtgtaaatataactattatttttatagttgtaataaaaagggaaatttgattgtatactttcggttctttaaaagaaactgacttgataaaaatggctgtaatctctaaggttacgtatagtctatatgatcaaaaagagattaatgctacagatattatcattagtcatgttaaaaatgacgacgatatcggtaccgttaaagatggtagactaggtgctatggatggggcattatgtaagacttgtgggaaaacggaattggaatgtttcggtcactggggtaaagtaagtatttataaaactcatatagttaagcctgaatttatttcagaaattattcgtttactgaatcatatatgtattcactgcggattattgcgttcacgagaaccgtattccgacgatattaacctaaaagagttatcgggacacgctcttaggagattaaaggataaaatattatccaagaaaaagtcatgttggaacagtgaatgtatgcaaccgtatcaaaaaattactttttcaaagaaaaaggtttgtttcgtcaacaagttggatgatattaacgttcctaattctctcatctatcaaaagttaatttctattcatgaaaagttttggccattattagaaattcatcaatatccagctaacttattttatacagactactttcccatccctccgttgattattagaccggctattagtttttggatagatagtatacccaaagagaccaatgaattaacttacttattaggtatgatcgttaagaattgtaacttgaatgctgatgaacaggttatccagaaggcggtaatagaatacgatgatattaaaattatttctaataacactaccagtatcaatttatcatatattacatccggcaaaaataatatgattagaagttatatcgtcgcccgacgaaaagatcagaccgctagatctgtaattggtcccagtacatctatcaccgttaatgaggtaggaatgcccgcatatattagaaatacacttacagaaaagatatttgttaatgcctttacagtggataaagttaaacaactattagcgtcaaaccaagttaaattttactttaataaacgattaaaccaattaacaagaatacgccaaggaaagtttattaaaaataaaatacatttattgcctggtgattgggtagaagtagctgttcaagaatatacaagtattatttttggaagacagccgtctctacatagatacaacgtcatcgcttcatctatcagagctaccgaaggagatactatcaaaatatctcccggaattgccaactctcaaaatgctgatttcgacggggatgaggaatggatgatattagaacaaaatcctaaagctgtaattgaacaaagtattcttatgtatccgacgacgttactcaaacacgatattcatggagcccccgtttatggatctattcaagatgaaatcgtagcagcgtattcattgtttaggatacaagatctttgtttagatgaagtattgaacatcttggggaaatatggaagagagttcgatcctaaaggtaaatgtaaattcagcggtaaagatatctatacttacttgataggtgaaaagattaattatccgggtctcttaaaggatggtgaaattattgcaaacgacgtagatagtaattttgttgtggctatgaggcatctgtcattggctggactcttatccgatcataagtcgaacgtggaaggtatcaactttattatcaagtcatcttatgtttttaagagatatctatctatttacggttttggggtgacattcaaagatctgagaccaaattcgacgttcactaataaattggaggccatcaacgtagaaaaaatagaacttatcaaagaagcatacgccaaatatctcaacgatgtaagagacgggaaaatagttccattatctaaagctttagaggcggactatgtggaatccatgttatccaacttgacaaatcttaatatccgagagatagaagaacatatgagacaaacgctgatagatgatccagataataacctcctgaaaatggccaaagcgggttataaagtaaatcccacagaactaatgtatattctaggtacgtatggacaacaaaggattgatggtgaaccagcagagactcgagtattgggtagagttttaccttactatcttccagactctaaggatccagaaggaagaggttatattcttaattctttaacaaaaggattaacgggttctcaatattacttttcgatgctggttgcaagatctcaatctactgatatcgtctgtgaaacatcacgtaccggaacactggctagaaaaatcattaaaaagatggaggatatggtggtcgacggatacggacaagtagttataggtaatacgctcatcaagtacgccgccaattataccaaaattctaggctcagtatgtaaacctgtagatcttatctatccagatgagtccatgacttggtatttggaaattagtgctctgtggaataaaataaaacagggattcgtttactctcagaaacagaaacttgcaaagaagacattggcgccgtttaatttcctagtattcgtcaaacccaccactgaggataatgctattaaggttaaggatctgtacgatatgattcataacgtcattgatgatgtgagagagaaatacttctttacggtatctaatatagattttatggagtatatattcttgacgcatcttaatccttctagaattagaattacaaaagaaacggctatcactatctttgaaaagttctatgaaaaactcaattatactctaggtggtggaactcctattggaattatttctgcacaggtattgtctgagaagtttacacaacaagccctgtccagttttcacactactgaaaaaagtggtgccgtcaaacaaaaacttggtttcaacgagtttaataacttgactaatttgagtaagaataagaccgaaattatcactctggtatccgatgatatctctaaacttcaatctgttaagattaatttcgaatttgtatgtttgggagaattaaatccagacatcactcttcgaaaagaaacagataggtatgtagtagatataatagtcaatagattatacatcaagagagcagaaataaccgaattagtcgtcgaatatatgattgaacgatttatctcctttagcgtcattgtaaaggaatggggtatggagacattcattgaggacgaggataatattagatttactgtctatctaaatttcgttgaaccggaagaattgaatcttagtaagtttatgatggttcttccgggggcagccaacaagggaaagattagtaaattcaagattcctatctctgattatacgggttatgacgacttcaatcaaacaaaaaagctcaataagatgactgtagaactcatgaatctaaaagaattgggttctttcgatttggaaaacgtcaacgtgtatcctggagtatggaatacatacgatatcttcggtatcgaggccgctcgtgaatacttgtgcgaagccatgttaaacacctatggagaagggttcgattatctgtatcagccttgtgatcttctcgctagtttactatgtgctagttacgaaccagaatcagtgaataaattcaagttcggcgcagctagtactcttaagagagctacgttcggagacaataaagcattgttaaacgcggctcttcataaaaagtcagaacctattaacgataatagtagctgccacttttttagcaaggtccctaatataggaactggatattacaaatactttatcgacttgggtcttctcatgagaatggaaaggaaactatctgataagatatcttctcaaaagatcaaggaaatggaagaaacagaagacttttaattcttatcaataacatatttttctatgatctgtcttttaaacgatggattttccacaaatgcgcctctcaagtccctcatagaatgatacacgtataaaaaatatagcataggcaatgactccttatttttagacattagatatgccaaaatcatagccccgcttctatttactcccgcagcacaatgaaccaacacgggctcgtttcgttgatcacatttagataaaaaggcggttacgtcgtcaaaatatttactaatatcggtagttgtatcatctaccaacggtatatgaataatattaatattagagttaggtaatgtatatttatccatcgtcaaatttaaaacatatttgaacttaacttcagatgatggtgcatccatagcatttttataatttcccaaatacacattattggttacccttgtcattatagtgggagatttggctctgtgcatatctccagttgaacgtagtagtaagtatttatacaaacttttcttatccatttataacgtacaaatggataaaactactttatcggtaaacgcgtgtaatttagaatacgttagagaaaaggctatagtaggcgtacaagcagccaaaacatcaacacttatattctttgttattatattggcaattagtgcgctattactctggtttcagacgtctgataatccagtctttaatgaattaacgagatatatgcgaattaaaaatacggttaacgattggaaatcattaacggatagcaaaacaaaattagaaagtgatagaggtagacttctagccgctggtaaggatgatatattcgacttcaaatgtgtggatttcggcgcctattttatagctatgcgattggataagaaaacatatctgccgcaagctattaggcgaggtactggagacgcgtggatggttaaaaaggcggcaaaggtcgatccatctgctcaacaattttgtcagtatttgataaaacacaagtctaataatgttattacttgtggtaatgagatgttaaatgaattaggttatagcggttattttatgtcaccgcattggtgttccgattttagtaatatggaatagtgttagataaatgcggtaacgaatgttcctgtaaggaaccataacagcttagatttaacgttaaagatgagcataaacataataaacaaaattacaatcaaacctataacattaatatcaaacaatccaaaaaatgaaatcagtggagtagtaaacgcgtacataactcctggataacgtttagcagctgccgttcctattctagaccaaaaattcggtttcatgttttcgaaacggtattctgcaacaagtcgaggatcgtgttctacatatttggcggcgttatccagtatctgcctattgatcttcatttcgttttcgattctggctatttcaaaataaaatcccgatgatagacctccagactttataatttcatctacgatgttcagcgccgtagtaactctaataatataggctgataagctaacatcataccctcctgtatatgtgaatatggcatgatttttgtccattacaagctcggttttaactttattgcctgtaataatttctctcatctgtaggatatctatttttttgtcatgcattgccttcaagacgggacgaagaaacgtaatatcctcaataacgttatcgttttctacaataactacatattctacctttttattttctaactcggtaaaaaaattagaatcccatagggctaaatgtctagcgatatttcttttcgtttcctctgtacacatagtgttacaaaaccctgaaaagaagtgagtatacttgtcatcatttctaatgtttcctccagtccactgtataaacgcataatccttgtaatgatctggatcatccttgactaccacaacatttcttttttctggcataacttcgttgtcctttacatcatcgaacttctgatcattaatatgctcatgaacattaggaaatgtttctgatggaggtctatcaataactggcacaacaataacaggagttttcaccgccgccatttagttattgaaattaatcatatacaactctttaatacgagttatattttcgtctatccattgtttcacattgacatatttcgacaaaaagatataaaatgcgtattccaatgcttctctgtttaatgaattactaaaatatacaaacacgtcactgtctggcaataaatgatatcttagaatattgtaacaatttattttgtattgcacatgttcgtgatctatgagttcttcttcgaatggcataggatctccgaatctgaaaacgtataaataggagttagaataataatatttgagagtattggtaatatataaactctttagcggtataattagtttttttctctcaatttctatttttagatgtgatggaaaaatgactaattttgtagcattagtatcatgaactctaattaaaatcttaatatcttcgtcacacgttagctctttgaagtttttaagagatgcatcagttggttctacagatggagtaggtgcaacaattttttgttctacacatgtatgtactggagccattgttttaactataatggtgcttgtatcgaaaaactttaatgcagatagcggaagctcttcgccgcgactttctacgtcgtaattgggttctaacgccgatctctgaatggatactagttttctaagttctaatgtgattctctgaaaatgtaaatccaattcctccggcattatagatgtgtatacatcggtaaataaaactatagtatccaacgatcccttctcgcaaattctagtcttaaccaaaaaatcgtatataaccacggagatggcgtatttaagagtggattcttctaccgttttgttcttggatgtcatataggaaactataaagtccgcactactgttaagaatgattactaacgcaactatatagtttaaattaagcattttggaaacataaaataactctgtagacgatacttgactttcgaataagtttgcagacaaacgaagaaagaacagacctctcttaatttcagaagaaaactttttttcgtattcctgacgtctagagtttatatcaataagaaagttaagaattagtcggttaatgttgtatttcattacccaagtttgagatttcataatattatcaaaagacatgataatattaaagataaagcgctgactatgaacgaaatagctatatggttcgctcaagaatatagtcttgttaaacgtggaaacgataactgtatttttaatcacgtcagcggcatctaaattaaatataggtatatttattccacacactctacaatatgccacaccatcttcataataaataaattcgttagcaaaattattaattttagtgaaatagttagcgtcaactttcatagcttccttcaatctaatttgatgctcacacggtgcgaattccactctaacatcccttttccatgcctcaggttcatcgatctctataatatctagttttttgcgtttcacaaacacaggctcgtctctcgcgatgagatctgtatagtaactatgtaaatgataactagatagaaagatgtagctatatagatgacgatcctttaagagaggtataataactttaccccaatcagatagactgttgttatggtcttcggaaaaagaatttttataaatttttccagtattttccaaatatacgtacttaacatctaaaaaatccttaatgataataggaatggataatccgtctattttataaagaaatacatatcgcacattatacttttttttggaaatgggaataccgatgtgtctacataaatatgcaaagtctaaatattttttagagaatcttagttggtccaaattcttttccaagtacggtaatagatttttcatattgaacggtatcttcttaatctctggttctagttccgcattaaatgatgaaactaagtcactatttttataactaacgattacatcacctctaacatcatcatttaccagaatactgatcttcttttgtcgtaaatacatgtctaatgtgttaaaaaaaagatcatacaagttatacgtcatttcatctgtggtattcttgtcattgaaggataaactcgtactaatctcttctttaacagcctgttcaaatttatatcctatatacgaaaaaatagcaaccagtgtttgatcatccgcgtcaatattctgttctatcgtagtgtataacaatcgtatatcttcttctgtgatagtcgatacgttataaaggttgataacgaaaatatttttatttcgtgaaataaagtcatcgtaggattttggacttatattcgcgtctagtagatatgcttttatttttggaatgatctcaattagaatagtctctttagagtccatttaaagttacaaacaactaggaaattggtttatgatgtataatttttttagtttttatagattctttattctatacttaaaaaatgaaaataaatacaaaggttcttgagggttgtgttaaattgaaagcgagaaataatcataaattatttcattatcgcgatatccgttaagtttgtatcgtaatggcgtggtcaattacgaataaagcggatactagtagcttcacaaagatggctgaaatcagagctcatctaaaaaatagcgctgaaaataaagataaaaacgaggatattttcccggaagatgtaataattccatctactaagcccaaaaccaaacgagccactactcctcgtaaaccagcggctactaaaagatcaaccaaaaaggaggaagtggaagaagaagtagttatagaggaatatcatcaaacaactgaaaaaaattctccatctcctggagtcagcgacattgtagaaagcgtggccgctgtagagctcgatgatagcgacggggatgatgaacctatggtacaagttgaagctggtaaagtaaatcatagtgctagaagcgatctctctgacctaaaggtggctaccgacaatatcgttaaagatcttaagaaaattattactagaatctctgcagtatcgacggttctagaggatgttcaagcagctggtatctctagacaatttacttctatgactaaagctattacaacactatctgatctagtcaccgagggaaaatctaaagttgttcgtaaaaaagttaaaacttgtaagaagtaaatgcgtgcacttttttataaagatggtaaactctttaccgataataattttttaaatcctgtatcagacgataatccagcgtatgaggttttgcaacatgttaaaattcctactcatttaacagatgtagtagtatatgaacaaacgtgggaggaggcgttaactagattaatttttgtgggaagcgattcaaaaggacgtagacaatacttttacggaaaaatgcatgtacagaatcgcaacgctaaaagagatcgtatttttgttagagtatataacgttatgaaacgaattaattgttttataaacaaaaatataaagaaatcgtccacagattccaattatcagttggcggtttttatgttaatggaaactatgttttttattagatttggtaaaatgaaatatcttaaggagaatgaaacagtagggttattaacactaaaaaataaacacatagaaataagtcccgatgaaatagttatcaagtttgtaggaaaggacaaagtttcacatgaatttgttgttcataagtctaatagactatataaaccgctattgaaactgacggatgattctagtcccgaagaatttctgttcaacaaactaagtgaacgaaaggtatacgaatgtatcaaacagtttggtattagaatcaaggatctccgaacgtatggagtcaattatacgtttttatataatttttggacaaatgtaaagtccatatctcctcttccgtcaccaaaaaagttaatagcgttaactatcaaacaaactgctgaagtggtaggtcatactccatcaatttcaaaaagagcttatatggcaacgactattttagaaatggtaaaggataaaaattttttagatgtagtatctaaaactacgttcgatgaattcctatctatagtcgtagatcacgttaaatcatctacggatggatgatatagatctttacacaaataattacaagaccgataaatggaaatggataagcgtatgaaatctctcgcaatgacagctttcttcggagagctaaacacattagatattatggcattgataatgtctatatttaaacgccatccaaacaataccattttttcagtggataaggatggtcagtttatgattgatttcgaatacgataattataaggcttctcaatatttggatctgaccctcactccgatatttggagatgaatgcaagactcacgcatcgagtatagccgaacaattggcgtgtgcggatattattaaagaggatattagcgaatatatcaaaactactccccgtcttaaacgatttataaaaaaataccgcaatagatcagatactcgcatcagtcgagatacagaaaagcttaaaatagctctagctaaaggcatagattacgaatatataaaagacgcttgttaataagtaaatgaaaaaaaactagtcgtttataataaaacacgatatggatgccaacgtagtatcatcttctactattgcgacgtatatagacgctttagcgaagaatgcttcagaattagaacagaggtctaccgcatacgaaataaataatgaattggaactagtatttattaagccgccattgattactttgacaaatgtagtgaatatctctacgattcaggaatcgtttattcgatttaccgttactaataaggaaggtgttaaaattagaactaagattccattatctaaggtacatggtctagatgtaaaaaatgtacagttagtagatgctatagataacatagtttgggaaaagaaatcattagtgacggaaaatcgtcttcacaaagaatgcttgttgagactatcgacagaggaacgtcatatatttttggattacaagaaatatggatcctctatccgactagaattagtcaatcttattcaagcaaaaacaaaaaactttacgatagactttaagctaaaatattttctaggatccggtgcccaatctaaaagttctttattacacgctattaatcatccaaagtcaaggcctaatacatctctggaaatagaattcacacctagagacaatgaaacagttccatatgatgaactaataaaggaattgacgactctatcacgtcatatatttatggcttctccagagaatgtaattctttctccgcctattaacgcgcctataaaaacctttatgttgcctaaacaagatatagtaggtttggatctggaaaatctatatgccgtaactaagactgacggcattcctataactatcagagttacatcaaacgggttgtattgttattttacacatcttggttatattattagatatcctgttaagagaataatagattccgaagtagtagtctttggtgaggcagttaaggataagaactggaccgtatatctcattaagctaatagagcccgtgaatgctatcagtgatagactagaagaaagtaagtatgttgaatctaaactagtggatatttgtgatcggatagtattcaagtcaaagaaatacgaaggtccgtttactacaactagtgaagtcgtcgatatgttatctacatatttaccaaagcaaccagaaggtgttattctgttctattcaaagggacctaaatctaacattgattttaaaattaaaaaggaaaatactatagaccaaactgcaaatgtagtatttaggtacatgtccagtgaaccaattatctttggagaatcgtctatctttgtagagtataagaaatttagcaacgataaaggctttcctaaagaatatggttctggtaagattgtgttatataacggcgttaattatctaaataatatctattgtttggaatatattaatacacataatgaagtgggtattaagtccgtggttgtacctattaagtttatagcagaattcttagttaatggagaaatacttaaacctagaattgataaaaccatgaaatatattaactcagaagattattatggaaatcaacataatatcatagtcgaacatttaagagatcaaagcatcaaaataggagatatctttaacgaggataaactatcggatgtgggacatcaatacgccaataatgataaatttagattaaatccagaagttagttattttacgaataaacgaactagaggaccgttgggaattttatcaaactacgtcaagactcttcttatttctatgtattgttccaaaacatttttagacgattccaacaaacgaaaggtattggcgattgattttggaaacggtgctgacctggaaaaatacttttatggagagattgcgttattggtagcgacggatccggatgctgatgctatagctagaggaaatgaaagatacaacaaattaaactctggaattaaaaccaagtactacaaatttgactacattcaggaaactattcgatccgatacatttgtctctagtgtcagagaagtattctattttggaaagtttaatatcatcgactggcagtttgctatccattattcttttcatccgagacattatgctaccgtcatgaataacttatccgaactaactgcttctggaggcaaggtattaatcactaccatggacggagacaaattatcaaaattaacagataaaaagacttttataattcataagaatttacctagtagcgaaaactatatgtctgtagaaaaaatagctgatgatagaatagtggtatataatccatcaacaatgtctactccaatgactgaatacattatcaaaaagaacgatatagtcagagtgtttaacgaatacggatttgttcttgtagataacgttgatttcgctacaattatagaacgaagtaaaaagtttattaatggcgcatctacaatggaagatagaccgtctacaaaaaactttttcgaactaaatagaggagccattaaatgtgaaggtttagatgtcgaagacttacttagttactatgttgtttatgtcttttctaagcggtaaataataatatggtatgggttctgatatccccgttctaaatgcattaaataattccaatagagcgatttttgttcctataggaccttccaactgtggatactctgtattgttaatagatatattaatacttttgtcgggtaacagaggttctacgtcttctaaaaataaaagttttataacatctggcctgttcataaataaaaacttggcgattctatatatactcttattatcaaatctagccattgtcttatagatgtgagctactgtaggtgtaccatttgattttctttctaatactatatatttctctcgaagaagttcttgcacatcatctgggaataaaatactactgttgagtaaatcagttattttttttatatcgatattgatggacatttttatagttaaggataataagtatcccaaagtcgataacgacgataacgaagtatttatacttttaggaaatcacaatgactttatcagattaaaattaacaaaattaaaggagcatgtatttttttctgaatatattgtgactccagatacatatggatctttatgcgtcgaattaaatgggtctagttttcagcacggcggtagatatatagaggtggaggaatttatagatgctggaagacaagttagatggtgttctacatccaatcatatatctgaagatatacccgaagatatacacactgataaatttgtcatttatgatatatacacttttgattcgttcaagaataaacgattggtatttgtacaggtacctccgtcgttaggagatgatagtcatttgactaatccgttattgtctccgtattatcgtaattcagtagccagacaaatggtcaatgatatgatttttaatcaagattcatttttaaaatatttattagaacatctgattagaagccactatagagtttctaaacatataacaatagttagatacaaggataccgaagaattaaatctaacgagaatatgttataatagagataagtttaaggcgtttgtattcgcttggtttaacggcgtttcggaaaatgaaaaggtactagatacgtataaaaaggtatctaatttgatataatgaattcagtgactgtatcacacgcgccatatactattacttatcacgatgattgggaaccagtaatgagtcaattggtagagttttataacgaagtagccagttggctgctacgagacgagacgtcgcctattcctgataagttctttatacagttgaaacaaccgcttagaaataaacgagtatgtgtgtgcggtatagatccgtatccgaaagatggaactggtgtaccgttcgaatcaccaaattttacaaaaaaatcaattaaggagatagcttcatctatatctagattaaccggagtaattgattataaaggttataaccttaatataatagacggggttataccctggaattattacttaagttgtaaattaggagaaacaaaaagtcacgcgatctactgggataagatttccaagttactgctgcagcatataactaaacacgttagtgttctttattgtttgggtaaaacagatttctcgaatatacgggcaaagttagaatccccggtaactaccatagtcggatatcatccagcggctagagaccgccaattcgagaaagatagatcatttgaaattatcaacgttttactggaattagacaacaaggcacctataaattgggctcaagggtttatttattaatgctttagtgaaattttaacttgtgttctaaatggatgcggctattagaggtaatgatgttatctttgttcttaagactataggtgtcccgtcagcgtgcagacaaaatgaagatccaagatttgtagaagcatttaaatgcgacgagttagaaagatatattgagaataatccagaatgtacactattcgaaagtcttagggatgaggaagcatactctatagtcagaattttcatggatgtagatttagacgcgtatctagacgaaatagattatttaacggctattcaagattttattatcgaggtgtcaaactgtgtagctagattcgcgtttacagaatgcggcgccattcatgaaaatgtaataaaatccatgagatctaatttttcattgactaagtctacaaatagagataaaacaagttttcatattatctttttagacacgtataccactatggatacattgatagctatgaaacgaacactattagaattaagtagatcatctgaaaatccactaaccagatcgatagacactgccgtatataggagaaaaacaactcttcgggttgtaggtactaggaaaaatccaaattgcgacactattcatgtaatgcaaccaccgcatgataatatagaagattacctattcacttacgtggatatgaacaacaatagttattacttttctctacaacaacgattggaggatttagttcctgataagttatgggaaccagggtttatttcattcgaagacgctataaaaagagtttcaaaaatattcattaattctataataaactttaatgatctcgatgaaaataattttacaacggtaccactggtcatagattacgtaacaccttgtgcattatgtaaaaaacgatcgcataaacatccgcatcaactatcgttggaaaatggtgctattagaatttacaaaactggtaatccacatagttgtaaagttaaaattgttccgttggatggtaataaactgtttaatattgcacaaagaattttagacactaactctgttttattaaccgaacgaggagaccatatagtttggattaataattcatggaaatttaacagcgaagaacccttgataacaaaactaattttgtcaataagacatcaactacctaaggaatattcaagcgaattactctgtccgaggaaacgaaagactgtagaagctaacatacgagacatgttagtagattcagtggagaccgatacctatccggataaacttccgtttaaaaatggtgtattggacctggtagacggaatgttttactctggagatgatgctaaaaaatatacgtgtactgtatcaaccggatttaaatttgacgatacaaagttcgtcgaagacagtccagaaatggaagagttaatgaatatcattaacgatatccaaccattaacggatgaaaataagaaaaatagagagctatatgaaaaaacattatctagttgtttatgcggtgctaccaaaggatgtttaacattcttttttggagaaactgcaactggaaagtcgacaaccaaacgtttgttaaagtctgctatcggtgacctgtttgttgagacgggtcaaacaattttaacagatgtattggataaaggacctaatccatttatcgctaacatgcatttgaaaagatctgtattctgtagcgaactacctgattttgcatgtagtgggtcaaagaaaatcagatctgataatattaaaaagttgacagaaccttgtgtcattggaagaccgtgtttctccaataaaattaataatagaaaccatgcgacaatcattatcgatactaattacaaacctgtttttgataggatagataacgcattaatgagaagaattgccgtcgtgcgattcagaacacacttttctcaaccttctggtagagaggctgctgaaaataatgacgcgtacgataaagtcaaactattagacgaggggttagatggtaaaatacaaaataatagatatagattcgcatttctatacttgttggtgaaatggtacagaaaatatcatgttcctattatgaaactatatcctacacccgaagagattcctgactttgcattctatctcaaaataggtactctgttggtatctagctctgtaaagcatattccattaatgacggacctctccaaaaagggatatatattgtacgataatgtggtcactcttccgttgactactttccaacagaaaatatccaagtattttaattctagactatttggacacgatatagagagcttcatcaatagacataagaaatttgccaatgttagtgatgaatatctgcaatatatattcatagaggatatttcatctccgtaaatatatgctcatatatttatagaagatatcacatatctaaatgaataccggaatcatagatttatttgataatcatgttgatagtataccaactatattacctcatcagttagctactctagattatctagttagaactatcatagatgagaacagaagcgtgttattgttccatattatgggatcaggtaaaacaataatcgctttgttgttcgccttggtagcttccagatttaaaaaggtttacattctagtgccgaacatcaacatcttaaaaattttcaattataatatgggtgtagctatgaacttgtttaatgacgaattcatagctgagaatatctttattcattccacaacaagtttttattctcttaattataacgataacgtcattaattataacggattatctcgctacaataactctatttttatcgttgatgaggcacataatatctttgggaataatactggagaacttatgaccgtgataaaaaataaaaacaagattccttttttactattgtctggatctcccattactaacacacctaatactctgggtcatattatagatttaatgtccgaagagacgatagattttggtgaaattattagtcgtggtaagaaagtaattcagacacttcttaacgaacgcggtgtgaatgtacttaaggatttgcttaaaggaagaatatcatattacgaaatgcctgataaagatctaccaacgataagatatcacggacgtaagtttctagatactagagtagtatattgtcacatgtctaaacttcaagagagagattatatgattactagacgacagctatgttatcatgaaatgtttgataaaaatatgtataacgtgtcaatggcagtattgggacaacttaatctgatgaataatttagatactttatttcaggaacaggataaggaattgtacccaaatctgaaaataaataatggcgtgttatacggagaagaattggtaacgttaaacattagttccaaatttaaatactttattaatcggatacagacactcaacggaaaacattttatatacttttctaattctacatatggcggattggtaattaaatatatcatgctcagtaatggatattctgaatataatggttctcagggaactaatccacatatgataaacggcaaaccaaaaacatttgctatcgttactagtaaaatgaaatcgtctttagaggatctattagatgtgtataattctcctgaaaacgatgatggtagtcaattgatgtttttgttttcatcaaacattatgtccgaatcctatactctaaaagaggtaaggcatatttggtttatgactatcccagatactttttctcaatacaaccaaattcttggacgatctattagaaaattctcttacgccgatatttctgaaccagttaatgtatatcttttagccgccgtatattccgatttcaatgacgaagtgacgtcattaaacgattacacacaggatgaattaattaatgttttaccatttgacatcaaaaagctgttgtatctaaaatttaagacgaaagaaacgaatagaatatactctattcttcaagagatgtctgaaacgtattctcttccaccacatccatcaattgtaaaagttttattgggagaattggtcagacaatttttttataataattctcgtattaagtataacgataccaagttacttaaaatggttacatcagttataaaaaataaagaagacgctaggaattacatagatgatattgtaaacggtcacttctttgtatcgaataaagtatttgataaatctcttttatacaaatacgaaaacgatattattacagtaccgtttagactttcctacgaaccatttgtttggggagttaactttcgtaaagaatataacgtggtatcttctccataaaactgatgagatatataaagaaataaatgtcgagctttgttaccaatggatacctttccgttacattggaaccacacgagctgacgttagacataaaaactaatattaggaatgccgtatataagacgtatctccatagagaaattagtggtaaaatggccaagaaaatagaaattcgtgaagacgtggaattacctctcggcgaaatagttaataattctgtagttataaacgttccgtgtgtaataacctacgcgtattatcacgttggggatatagtcagaggaacattaaacatcgaagatgaatcaaatgtaactattcaatgtggagatttaatctgtaaactaagtagagattcgggtactgtatcatttagcgattcaaagtactgcttttttcgaaatggtaatgcgtatgacaatggcagcgaagtcactgccgttctaatggaggctcaacaaggtatcgaatctagttttgtttttctcgcgaatatcgtcgactcataaaaaagagaatagcggtaagtataaacacgaatactatggcaataattgcgaatgttttattctcttcgatatatttttgataatatgaaaaacatgtctctctcaaatcggacaaccatctcataaaatagttctcgcgcgctggagaggtagttgccgctcgtataatctctccagaataatatacttgcgtgtcgtcgttcaatttatacggatttctatagttctctgttatataatgcggtttgccctcatgattagacgacgacaatagtgttctaaatttagatagttgatcagaatgaatgtttattggcgttggaaaaattatccatacagcgtctgcagagtggttgatagttgttcctagatatgtaaaataatccaacttactaggcagcaaattgtctagataaaatactgaatcaaacggtgcagacgtattggcggatctaatggaatccaattgattaactatcttttgaaaatatacatttttatgatccaatacttgtaagaatatagaaataatgataagtccatcatcgtgtttttttgcctcttcataagaactatattttttcttattccaatgaacaagattaatctctccagagtatttgtacacatctatcaagtgattggatccataatcgtcttcctttccccaatatatatgtagtgatgataacacatattcattggggagaaaccctccacttatatatcctcctttaaaattaatccttactagttttccagtgttctggatagtggttggtttcgactcattataatgtatgtctaacggcttcaatcgcgcgttagaaattgcttttttagtttctatattaataggagatagttgttgcggcatagtaaaaatgaaatgataactgtttaaaaatagctcttagtatgggaattacaatggatgaggaagtgatatttgaaactcctagagaattaatatctattaaacgaataaaagatattccaagatcaaaagacacgcatgtgtttgctgcgtgtataacaagtgacggatatccgttaataggagctagaagaacttcattcgcgttccaggcgatattatctcaacaaaattcagattctatctttagagtatccactaaactattacggtttatgtactacaatgaactaagagaaatctttagacggttgagaaaaggttctatcaacaatatcgatcctcactttgaagagttaatattattgggtggtaaactagataaaaaggaatctattaaagattgtttaagaagagaattaaaagaggaaagtgatgaacgtataacagtaaaagaatttggaaatgtaattctaaaacttacaacacgggataaattatttaataaagtatatataagttattgcatggcgtgttttattaatcaatcgttggaggatttatcgcatactagtatttacaatgtagaaattagaaagattaaatcattaaatgattgtattaacgacgataaatacgaatatctgtcttatatttataatatgctagttaatagtaaatgaacttttacagatctagtataattagtcagattattaagtataatagacgactagctaagtctattatttgcgaggatgactctcaaattattacactcacggcattcgttaaccaatgcctatggtgtcataaacgagtatccgtgtccgctattttattaactactgataacaaaatattagtatgtaacagacgagatagttttctctattctgaaataattagaactagaaacatgtttagaaagaaacgattatttctgaattattccaattatttgaacaaacaggaaagaagtatactatcgtcatttttttctctagatccagctactactgataatgatagaatagacgctatttatccgggtggcatacccaaaaggggtgagaatgttccagagtgtttatccagggaaattaaagaagaagttaatatagacaattcttttgtattcatagacactcggttttttattcatggcatcatagaagataccattattaataaattttttgaggtaatcttctttgtcggaagaatatctctaacgagtgatcaaatcattgatacatttaaaagtaatcatgaaatcaaggatctaatatttttagatccgaattcaggtaatggactccaatacgaaattgcaaaatatgctctagatactgcaaaacttaaatgttacggccatagaggatgttattatgaatcattaaaaaaattaactgaggatgattgattaaaaaatataaattaatttaccatcgtgtatttttataacgggattgtccggcatatcatgtagatagttaccgtctacatcgtatactcgaccatctacgcctttaaatcctctatttattgacattaatctattagaattggaataccaaatattagtaccctcaattagtttattggtaatattttttttagacgatagatcgatggctcttgaaaccaaggttttccaaccggactcattgtcgatcggtgagaagtctttttcattagcatgaatccattctaatgatgtatgtttaaacactctaaacaattggacaaattcttttgatttgctttgaatgatttcaaataggtcttcgtctacagtaggcataccattagataatctagccattataaagtgcacgtttacatatctacgttctggaggagtaagaacgtgactattgagacgaatggctcttcctactatctgacgaagagacgcctcgttccatgtcatatctaaaatgaagatatcattaattgagaaaaaactaataccctcgcctccactagaagagaatacgcatgttttaatgcattctccgttagtgtttgattcttggttaaactcagccaccgccttgattctagtatcttttgttctagatgagaactctatattagagataccaaagactttgaaatatagtaataagatttctattcctgactgattaacaaatggttcaaagactagacatttaccatgggatgctaatattcccaaacatacatctataaatttgacgcttttctcttttaattcagtaaatagagagatatcagccgcactagcatcccctttcaatagttctccctttttaaaggtatctaatgcggatttagaaaactctctatctcttaatgaatttttaaaatcattatatagtgttgctatctcttgcgcgtattcgcccggatcacgattttgtctttcaggaaagctatcgaacgtaaacgtagtagccatacgtctcagaattctaaatgatgatatacctgtttttatttcagcgagtttagccttttgataaatttcttcttgctttttcgacatattaacgtatcgcattaatactgttttcttagcgaatgatgcagacccttctacgtcatcaaaaatagaaaactcgttattaactatatacgaacatagtcctcctagtttggagactaattctttttcatcgactagacgtttattctcaaatagtgattggtgttgtaaggatcctggtcgtagtaagttaaccaacatggtgaattcttgcacactattgacgataggtgtagccgataaacaaatcatcttatggttttttaacgcaatggtcttagataaaaaattatatactgaacgagtaggacggatcttaccatcttctttgattaatgatttagaaatgaagttatgacattcatcaatgatgacgcatattctactcttggaattaatagttttgatattagtaaaaaatttatttctaaaattttgatcatcgtaattaataaaaatacaatccttcgttatctctggagcgtatctgagtatagtgttcatccaaggatcttctatcaaagcctttttcaccaataagataatagcccaattcgtataaatatccttaagatgtttgagaatatatacagtagtcattgttttaccgacacccgtttcatggaacaataaaagagaatgcatactgtctaatcctaagaaaactcttgctacaaaatgttgataatccttgaggcgtactacgtccgaccccatcatttcaacgggcatattagtagttctgcgtaaggcataatcgatataggccgcgtgtgatttactcatttatgagtgataagtaataactatgttttaaaaatcacagcagtagtttaactagtcttctctgatgtttgttttcgatactttttgaatcagaagtcatactagaataaagcaacgagtgaacgtaatagagagcttcgtatactctattcgaaaactctaagaacttattaatgaattccgtatccactggattgtttaaaatactaaattgaacactgttcacatccttccaagaagaagacttagtgacggacttaacatgagacataaataaatccaaattttttttacaaacatcactagccaccataatggcgctatctttcaaccagctatcgcttacgcattttagcagtctaacatttttaaagagactacaatatattctcatagtatcgattacacctctaccgaataaagttggaagtttaataatacaatatttttcgtttacaaaatcaaataatggtcgaaacacgtcgaaggttaacatcttataatcgctaatgtatagattgttttcagtgagatgattattagatttaatagcatctcgttcacgtttgaacagtttattgcgtgcgctgaggtcggcaactacggcgtccgctttagtactcctcccataatactttacgctattaatctttaaaatttcatagactttatctagatcgctttctggtaacatgatatcatgtgtaaaaagttttaacatgtcggtcggcattctatttagatcattaactctagaaatctgaagaaagtaattagctccgtattccagactaggtaatgggcttttacctagagacagattaagttctggcaatgtttcataaaatggaagaaggacatgcgttccctcccggatattttttacaatttcatccatttacaactctatagtttgttttcattattattagttattatctcccataatcttggtaatacttaccccttgatcgtaagataccttatacaggtcattacatacaactaccaattgtttttgtacataatagattggatggttgacatccatggtggaataaactactcgaacagatagtttatctttccccctagatacattagccgtaatagttgtcggcctaaagaatatctttggtgtaaagttaaaagttagggttcttgttccattattgctttttgtcagtagttcattataaattctcgagatgggtccgttctctgaatatagaacatcatttccaaatctaacttctagtctagaaataatatcggtcttattcttaaaatctattcccttgatgaagggatcgttaatgaacaaatccttggcctttgattcggctgatctattatctccgttatagacgttacgttgactagtccaaagacttacaggaatagatgtatcgatgatgttgatactatgtgatatgtgagcaaagattgttctcttagtggcatcactatatgttccagtaatggcggaaaactttttagaaatgttatatataaaagaattttttcgtgttccaaacattagcagattagtatgaagataaacactcatattatcaggaacattatcaatttttacatacacatcagcatcttgaatagaaacgataccatcttctggaacctctacgatctcggcagactccggataaccagtcggtggaccatcgctaacaataactagatcatccaacaatctactcacatatgcatctatataatctttttcatcttgtgagtaccctggatacgaaataaatttattatccgtatttccataataaggtttagtataaacagagagcgatgttgccgcatgaacttcagttacagtcgccgttggttggtttatttgacctattactctcctaggtttctctataaacgatggtttaatttgtacattcttaaccatatatccaataaagctcaattcaggaacataaacaaattctttgttgaacgtttcaaagtcgaacgaagagtcacgaataacgatatcggatactggattgaaggtcaccgttacggtaatttttgaatcggatagtttaagactgctgaatgtatcttccacatcaaacggagttttaatataaacgtatactgtagatggttctttaatagtgtcattaggagttaggccaatagaaatatcattaagttcactagaatatccagagtgtttcaaagcaattgtattattgatacaattattatataattcttcgccctcaatttcccaaataacaccgttacacgaagagatagatacgtgattaatacatttatatccaacatatggtacgtaactgaatcttcccatacctttaacttctggaagttccaaactcagaaccaaatgattaagcgcagtaatatactgatccctaatttcgaagctagcgatagcctgattgtctggaccatcgtttgtcataactccggatagagaaatatattgcggcatatataaagttggaatttgactatcgactgcgaagacattagaccgtttaatagagtcatccccaccgatcaaagaattaatgatagtattattcattttctatttaaaatggaaaaagcttacaataaactccgtagagaaatatctataatttgtgagttttccttaaagtaacagcttccgtaaacgccgtctttatctcttagtaggtttattgtatttatgaccttttccttatcttcatagaatactaaaggcaacaaagaaatttttggttcttctctaagagctacgtgagacttaaccatagaagccaacgaatccctacatattttagaacagaaatacccaacttcaccacccttgtatgtctcaatactaataggtctaaaaaccaaatcttgattacaaaaccaacacttatcaattacactatttgtcttaatagacacatctgccatagatttataatactttggtagtatacaagcgagtgcttcttctttagcgggcttaaagactgctttaggtgctgaaataaccacatctggaaggcttactcgcttagccatttaattacggaactatttttttatacttctaatgagcaagtagaaaacctctcatctacaaaaacgtactcgtgtccataatcctctaccatagttacacgttttttagatctcatatgtgctaaaaagttttcccatactaattggttactattatttttcgtataatttttaacagtttgaggttttagatttttagttacagaagtgatatcgaatattttatccaaaaagaatgaataattaattgtcttagaaggagtgttttcttggcaaaagaataccaagtgcttaaatatttctactacttcattaatcttttctgtactcagattcagtttctcatcttttacttgattgattatttcaaagactaacttataatcctttttatttattctctcgttagccttaagaaaactagatacaaaatttgcatctacatcatccgtggatatttgatttttttccatgatatccaagagttccgagataatttctccagaacattgatgagacaataatctccgcaatacatttctcaaatgaataagtttattagacacgtggaagtttgactttttttgtacctttgtacatttttgaaataccgactcgcaaaaaatacaatattcatatccttgttcagatactataccgttatgtctacaaccgctacataatcgtagattcatgttaacactctacgtatctcgtcgtccaatattttatataaaaacattttatttctagacgttgccagaaaatcctgtaatatttttagttttttgggctgtgaataaagtatcgccctaatattgttaccgtcttccgccaatatagtagttaaattatccgcacatgcagaagaacaccgcttaggcggattcagtacaatgttatatttttcgtaccaactcatttaaatatcataatctaaaatagttctgtaatatgtctagcgctaatatattgatcataatcctgtgcataaattaagatacaacaatgtctcgaaatcatcgacatggcttcttccatagttagaagatcgtcgtcaaagttagcaacgtgattcatcaacatttgctgttttgaggcagcaaatactgaaccgtcgccattcaaccattcataaaaaccatcgtctgaatccattgataatttcttgtactggtttttgagagctcgcatcaatctagcatttctagctcccggattgaaaacagaaagaggatcgtacatccagggtccattttctgtaaatagaatcgtataatgtcccttcaagaagatatcagacgatccacaatcaaagaattggtctccgagtttgtaacaaactgcggactttaacctatacatgataccgtttagcataatttctggtgatacgtcaatcggagtatcatctattagagatctaaagccggtgtaacattctccaccaaacatattcttattctgacgtcgttctacataaaacatcattgctccattaacgataacaggggaatgaacagcactacccatcacattagttcccaatggatcaatgtgtgtaactccagaacatcttccatagcctatgttaggaggagcgaacaccactcttccactattgccatcgaatgccatagaataaatatccttggaattgatagaaatcggactgtcggatgttgtgatcatcttcataggattaacaactatgtatggtgccgcctgaagtttcatatcgtaactgatgccgtttataggtctagccacagaaaccaacgtaggtctaaatccaactatagacaaaatagaagccaatatctgttcctcatctgtcataacttgagagcatccagtatgaataatcttcattagatggggatctaccgcatcatcatcgttacaataaaaaattcccattctaatgttcataattgcttttctaatcatggtatgcatgtttgctctctgaatctctgtggaaattagatctgatacacctgtaatcactatcggattatcctccgtaagacgattaaccaacaacatataattataagactttacttttctaaattcataaagttgctggattaggctataggtgtctccatgtacatacgcgttctcgagcgcaggaagtttaataccgaatagtgccatcagaataggatgaatatagtaattagtttctggttttctataaataaaagacaaatcttgtgaactagacatatcggtaaaatgcatggattggaatcgtgtagtcgacagaagaatatgatgattagatggagagtatattttatctaactctttgagttggtcaccgattctaggactagctcgagaatgaataagtactaaaggatgagtacatttcacagaaacactagcattgttcaatgtgctctttacatgggtaaggagttgaaatagctcgtttctatttgttctgacaatatttagtttattcataatgttaagcatatcctgaatagtaaagttagatgtgtcatacttgttagtagttagatatttagcaattgcattcccatcatttctcaatctcgtactccaatcatgtgtagatgctacttcgtcgatggaaaccatacaatcctttttgataggctgttgagattgatcatttcctgcacgtttaggtttggtacgttgatttctagcccctgcggatataaagtcatcgtctacaatttgggacaatgaattgcatacactacaagacaaagatttatcagaagtgtgaatatgatcttcatctaccaaagaaagagtttgattagtataactagattttagtcctgcgttagatgttaaaaaaacatcgctattgaccacggcttccattatttatattcgtagtttttactcgaaagcgtgattttaatatccaatcttattacttttggaatcgttcaaaacctttgactagttgtagaatttgatctattgccctacgcgtatactcccttgcatcatatacgttcgtcaccagatcgtttgtttcggcctgaagttggtgcatatctctttcaacattcgacatgagatccttaagggccatatcgtctagattttgttgagatgctgctcctggatttggattttgttgtgctgttgtacatactgtaccaccagtaggtgtaggagtacatacagtggccacaataggaggttgagaaagtgtaaccgttggagtagtacaagaaatacttccatccgattgttgtgtacatgtagttgttggtaacgtctgagaaggttgggtagatggcggcgtcgtcgttttttgatctttattaaatttagagataatatcctgaacagcattgctcggcgtcaacgctggaaggagtgaactcgccggcgcatcagtatcttcagacagccaatcaaaaagattagacatatcagatgatgtattagtttgttgtcgtggttttggtgtaggagcagtactactaggtagaagaataggagccgatgtagctgttggaaccggctgtggagttatatgaatagttggttgtagcggttggataggctgtctgctggcggccatcatattatctctagctagttgttctcgcaactgtctttgataatacgactcttgagactttagtcctatttcaatcgcttcatcctttttcgtatccggatccttttcttcagaataatagattgacgactttggtgtagaggattctgccagcctctgtgagaacttgttaaagaagtccatttaaggctttaaaattgaattgcgattataagattaaatggcagacacagacgatattatcgactatgaatccgatgatctcaccgaatacgaggatgatgaagaagaggaagaagatggagagtcactagaaactagtgatatagatcccaaatcttcttataagattgtagaatcagcatccactcatatagaagatgcgcattccaatcttaaacatatagggaatcatatatctgctcttaaacgacgctatactagacgtataagtctatttgaaatagcgggtataatagcagaaagctataacttgcttcaacgaggaagattacctctagtttcagaattttctgacgaaacgatgaagcaaaatatgctacatgtaattatacaagagatagaggagggttcttgtcctatagtcatcgaaaagaacggagaattgttgtcggtaaacgattttgacaaagatggtctaaaattccatctagactatattatcaaaatttggaaacttcaaaaacgatattagaatttatacgaatatcgttctctaaatgtcacaatcaagtctcgcatgttcagcaatttattgtcgtactttatatcgtgttcattaacgatatcttgcaaaatagtaatgattctatcttccttcgatagatattcttcagagattattgtcttatattctttcttgttatcagatatgaatttgataagactttgaacattattgatacccgtctgtttaattttttctacagatattttagttttggcagattctatcgtatctgtcaatagacatccaacatcgacattcgacgtcaattgtctataaatcaacgtataaattttagaaataacattagcgaattgttgtgcgttgatgtcgttattctgaaacagtatgattttaggtagcattttcttaacaaagagaacgtatttattgttactcagttgaacagatgatatatccagattactaacgcatctgattccgtataccaaactttcagaagaaatggtatacaattgtttgtattcattcaatgtctctttttcagaaattagtttagagtcgaatactgcaataattttcaagagatagttttcatcagataagattttatttagtgtagatatgataaaactattgttttgttggagaacttgatacgccgcgttctctgtagtcgacgctctcaaatgggaaacaatctccattatttttttggaatcggatactatatcttcggtatcttgacgcagtctagtatacatagagttaagagagattagagtttgtacattaagcaacatgtctctaaatgtggctacaaacttttcctttttcacatcatctagtttattatataccgatttcacaacggcaccagatttaaggaaccagaatgaaaaactctgataactacaatatttcatcatagttacgattttatcatcttctatagttggtgtaatagcgcatacctttttctccaagactggaaccaacgtcataaaaatgtttaaatcaaaatccatatcaacatctgatgcgctaagaccagtctcgcgttcaagattatctttactaatggtgacgaactcatcgtataaaactctaagtttgtccattatttatttacagatttagttgtttaatttatttgtgctcttccagagttgggatagtatttttctaacgtcggtattatattattaggatctacgttcatatgtatcataatattaatcatccacgttttgataaatctatctttagcttctgaaataacgtatttaaacaaaggagaaaaatatttagctacggcatcagacgcaataacattttttgtaaatgtaacgtatttagacgacagatcttcgttaaaaagttttccatctatgtagaatccatcggttgttaacaccattcccgcgtcagattgaataggagtttgaatagtttgttttggaaatagatccttcaataacttatagttgggtgggaaaaaatcgattttatcactagactctttcttttttactatcattacctcatgaactatttcttgaatgagtatatgtattttctttcctatatcggacgcgttcattggaaaatataccatgtcgttaactataagaatatttttatcctcgtttacaaactgaataatatcagatgtagttcgtaaacgaactatatcatcaccagcacaacatctaactatatgatatccactagtttcctttagccgtttattatcttgttccatattagcagtcattccatcatttaagaaggcgtcaaagataatagggagaaatgacattttggattctgttacgactttaccaaaattaaggatatacggacttactatctttttctcaacgtcaatttgatgaacacacgatgaaaatgtgcttctatgagattgatcatgtagaaaacaacaagggatacaatatttccgcatatcatgaaatatattaagaaatcccaccttattatatttccccaaaggatccatgcacgtaaacattatgccgttatcattaataaagacttctttctcatcggatctgtaaaagttgttactgatttttttcattccaggatctagataattaataatgatgggttttctattcttattctttgtattttggcatatcctagaccagtaaacagtttccactttggtaaaatcagcagacttttgaacgctattaaacatggcattaatggcaataactaaaaatgtaaaatatttttctatgttaggaatatggtttttcactttaatagatatatggtttttggccaaaatgatagatatttttttatccgaggatagtaaaatattattagtcgccgtctctataaaaatgaagctagtctcgatatccaattttattctagaattgataggagtcgccaaatgtaccttatacgttatatctcccttgatgcgttccatttgtgtatctatatcggacacaagatctgtaaatagttttacgttattaatcatcacggtatcgccgtcgctagataacgctaatgtaccatccaagtcccaaatggagagatttaactgttcatcgtttagaataaaatgattaccggtcatattaataaagtgttcatcgtatctagataacaacgacttataattaatgtccaagtcttgaactcgctgaatgatcttttttaacccagttagttttagattggtacgaaatatattgttaaactttgattctacagtaatgtccaaatctagttgtggaaatacttccatcaacattgtttcaaacttgataatattattatctacatcttcgtacgatccaaattccggaatagatgtatcgcacgctctggccacccagataaccaaaaagtcacacgctccaggatatacattgtataaaaagctatcgttttttagtagggtttttttctgcgtgtatacgaagggattaaaaatagtattatcaacgtaactatattccaaattattcttatgagaatagataataatatcgtccttaatatctaacaaatttcctaaatatccctttaattgagtcattcgaagcgtcaatagaatatgtctcttaactatttccggctgttgtatatttaaatgacttcgtaaaaaataatatatgggcgacttctcatctatgtaatcatatggagtgagatatagggctcgttctacctcctgccccttacccacctgtaataccaattgcggacttactatatatcgcatatttatatcgtggggtaaagtgaaaatctactaccgatgatgtaagtcttacaatgttcgaaccagtaccagatcttaatttggaggcctccgtagaactaggggaggtaaatatagatcaaacaacacctatgataaaggagaatagcggttttatatcccgcagtagacgtctattcgcccatagatctaaggatgatgagagaaaactagcactacgattctttttacaaagactttattttttagatcatagagagattcattatttgttcagatgcgttgacgctgtaaaagacgtcactattaccaaaaaaaataacattatcgtggcgccttatatagcacttttaactatcgcatcaaaaggatgcaaacttacagaaacaatgattgaagcattctttccagaactatataatgaacatagtaagaaatttaaattcaactctcaagtatccatcatccaagaaaaactcggataccagtttggaaactatcacgtttatgattttgaaccgtattactctacagtagctctggctattcgagatgaacattcatctggcatttttaatatccgtcaagagagttatctggtaagttcattatctgaaataacatatagattttatctaattaatctaaaatctgatcttgttcaatggagtgctagtacgggcgctgtaattaatcaaatggtaaatactgtattgattacagtgtatgaaaagttacaactggtcatagaaaatgattcacaatttacatgttcattggctgtggaatcaaaacttccaataaaattacttaaagatagaaatgaattatttacaaaattcattaacgagttaaaaaagaccagttcattcaagataagcaaacgcgataaggatacgctactaaaatattttacttaggactggagttagaatttatagacgactcatttcgtttatcattgttactattattactattactatcattattagtgttggcattattagtattcttcttgtcatcttgttcagaaatatacagcaatgctatacctaatactaaatacattatcatgctcgcaatggctctaacaacaacgaaccaaaatgaatttggtcgtagcttttgttcacaaaaatacataaagaaatgtctacataaatctatggcgccattggctacttgaaatagcgccagtcctcctacagattttaatatagctgtataacatgacatttattcatcatcaaaagagacagagtcaccatctgtcatatttagattttttttcatgtgttcaaagtatcctctactcatttcattataatagtttatcatacttagaattttaggacggatcaatgagtaagacttgactagatcgtcagtagtaatttgtgcatcgtctattctgcatccgcttcgtcgaataatgtatagcatcgctttgagattctccatagctatcaagtctttatacaatgacatggaaatatctgtgaatactttatacttctccaacatcgatgccttaacatcatcgcctactttagcattgaaaatacgttctattgtgtagatggatgtagcaagatttttaaacaacaatgccatcttacacgatgattgcctcaagtctccaatcgtttgtttagaacgattagctacagagtccaatgcttggctgactagcatattattatctttagaaattgtattcttcaatgaggcgtttatcatatctgtgatttcgttagtcatattacagtctgactgggttgtaatgttatccaacatatcacctatggatacggtacacgtaccagcatttgtaataatcctatctaagatgttgtatggcattgcgcagaaaatatcttctcctgtaatatctccactctcgataaatctactcagattattcttaaatgccttattctctggagaaaagatatcagtgtccatcatttcattaatagtatacgcagaaaagataccacgagtatcaattctatccaagatacttatcggttccgagtcacagataatggtttcctctccttcgggagatcctgcatagaaatatctaggacaatagtttctatactgtctgtaactctgataatctctaaagtcactaactgataccatgaaattgagaagatcaaacgctgaagtaattaatttttctgcctcgtttttactacaactagttttcatcaatgtagtgacgatgtattgtttagttacttttggtctaatactgatgatagagatattattgcttcccataatggatcttctagtagtcaccttaaagcccattgatgcgaatagcagatagataaagtcttggtatgactcctttctaatatagtacggactacctttgtcacccaactttatacccacataagccataacaacctctttaatagccgtttcatgaggtttatcagccatgagcctgagtagttggaagaatctcatgaatcccgtctcagaaagtcctatatgcatgatagatttatctttcctgggaaactctcgtatagtcatagatgaaatactctttaaagtttctgaaataagattagtaacagtcttacctccgactactctaggtaacaaacaaactctaataggtgttttctctgcggagataatatcagaaaggatagagcaataagtagtattattgtgattataaagaccgaatacataacaggtagaatttataaacatcatgtcctgaaggtttttagacttgtattcctcgtaatccataccgtcccaaaacatggatttggtaactttgatagccgtagatctttgttccttcgccaacaggttaaagaaattaataaagaatttgttgtttctatttatgtccacaaattgcacgtttggaagcgccacggttacattcactgcagcattttgaggatcgcgagtatgaagtacgatgttattgtttactggtatatctggaaagaaatctaccagtctaggaataagagattgatatcgcatagaaatagtaaagtttataatctcatcatcgaagagcattttgttaccattgtaataaatatccactctgtcatatgtataaatgaagtactgttcaaacatgatgagatgtttatatgttggcatagtagtgagatcgacgtttggtaatggcaatgtattaagattaactccataatgtctagcagcatctgcgatgttataagcgtcgtcaaagcggggtcgatcttgtattgttatatattgtctaacacctataagattatcaaaatcttgtctgcttaatacaccgttaacaatttttgccttgaattcttttattggtgcattaataacatccttatagaggatgttaaacaaataagtgttatcaaagttaagatctggatatttcttttctgctagaacatccattgagtcggagccatctggtttaatataaccaccgataaatctagctctgtattctgtatccgtcaatctaatattaagaaggtgttgagtgaaaggtggaagatcgtaaaagctgtgagtattaatgataggattagtttccgaactaatgttaattggggtattaataatatctatatttccagcgttaagtgtaacattaaacagttttaattcacgtgacgtggtatcaattaaataattaatgcccaatttggatatagcagcctgaagctcatcttgtttagttacggatcctaatgagttattaagcaatatatcgaacggatgaacgaaggttgttttaagttggtcacatactttgtaatctagacatagatgcggaagaacggtagaaactatacgaaataaatattcagagtcctctaattgatcaagagtaactattgacttaataggcatcatttatttagtattaaatgacgaccgtaccagtgacggatatacaaaacgatttaattacagagttttcagaagataattatccatctaacaaaaattatgaaataactcttcgtcaaatgtctattctaactcacgttaacaacgtggtagatagagaacataatgccgccgtagtgtcatctccagaggaaatatcctcacaacttaatgaagatctatttccagatgatgattcaccggccactattatcgaacgagtacaacctcatactactattattgacgatactccacctcctacgtttcgtagagagttattaatatcggaacaacgtcaacaacgagaaaaaagatttaatattacagtatcgaaaaatgctgaagcaataatggaatctagatctatgataacttctatgccaacacaaacaccatccttgggagtagtttatgataaagataaaagaattcagatgttagaggatgaagtggttaatcttagaaatcaacgatctaatacaaaatcatctgataatttagataattttaccaaaatactatttggtaagactccgtataaatcaacagaagttaataagcgtatagccatcgttaattatgcaaatttgaacgggtctcccttatcagtcgaggacttggatgtttgttcggaggatgaaatagatagaatctataaaacgattaaacaatatcacgaaagtagaaaacgaaaaattatcgtcactaacgtgattattattgtcataaacattatcgagcaggcattgctaaaactcggatttgaagaaatcaaaggactgagtaccgatatcacttcagaaattatcgatgtggagatcggagatgactgcgatgctgtagcatcaaaactaggaatcggtaacagtccggttcttaatattgtattgtttatactcaagatattcgttaaacgaattaaaattatttaatttaatacattcccatatccagacaacaatcgtctggattaatctgttcctgtcgtctcataccggacgacatattaatctttttattagtgggcatctttttagatggtttctttttcccagcattaactgagtcgatacctagaagatcgtgattgatctctccgaccattccacgaacttctaattggccgtctctgacggtaccataaactattttaccagcattagtaacagcttggacaatctgaccatccatcgcattgtacgatgtagtagtaactgttgttctacgtctaggagcaccagaagtatttttggagcccttggatgttgatgtagaagaagacgaggattttgattttggtttacatgtaatacattttgaactctttgattttgtatcacatgcgccggcagtcacatctgtttgagaattaagattattgttgcctcctttgacggctgcatctccaccgatttgcgctagtagatttttaagctgtggtgtaatcttattaactgtttcgatataatcatcgtaactgcttctaacggctaaattttttttatccgccatttagaagctaaaaatatttttatttatgcagaagatttaactagattatacaatgaactaatatgatccttttccagattatttacaaacttggtattttttggttctggaggaggcgaatttaaattcggacttggattcggattttgtaagttcttgatcttattatacatcgagtataggatggcgacagtaactgctacacaaataccgatcaaaagaagaataccaatcatttattgacaataacttcactattgatcaagtatgcaatatatcatcttttcactaaataagtagtaataatgattcaacaatgtcgagatatatggacgataataatttagttcatggaaatatcgctatgattggtgtgaatgactccgctaactctgtggggtgcgcagtgctttccccacatagaataaattagcattccgactgtgataataataccaagtataaacgccataatactcaatactttccatgtacgagtgggactggtagacttactaaagtcaataaaggcgaagatacacgaaagaatcaaaagaatgattccagcgattagcacgccggaaaaataatttccaatcataagcatcatgtccatttaactaataaaaattttaaatcgccgaatgaacaaagtggaatataaaccatataaaaacaatagtttgtactgcaaaaataatatctatttttgttttcgaagatatggtaaaattaaatagtagtacacagcatgttataactaacagcagcaacggctcgtaattacttatcatttactagacgaaaaggtggtgggatattttcttgctcaaataatacgaatatatcacccatccattttatgcgatgtttatatactctaatctttaatagatctatagacgacgggtttaccaacaatatagattttatcgattcatctaatttaaacccttccttaaacgtgaatgatctattatctggcataacgatgaccctacctgatgaatcggacaatgtactgggccatgtagaataaattatcaacgaattatcgtctacgaacatttatatcatttgttttaattttaggacgcgaataaatggatataaaatagaaaataacagatattacaaccaatgttatggccgcgcccaaccaggtaggcagttttattttatcttttactacaggttctcctggatgtacgtcaccaacggcggacgtagttctagtacaattagacgtaagttccgcttgggaattttttaacgctaaagagttaacgttaatcgtgcacccaacgtatttacatctagttcgttgaacatcttgattataatataaccattttctatctctagattcgtcagtgcactcatgtaaccaacataccctaggtcctaaatatttatctccggaattagattttggataattcgcgcaccaacaatttctatttcctttatgatcgttacaaaagacgtataatgccgtatccccaaaagtaaaataatcaggacgaataattctaataaactcagaacaatatctcgcatccatatgtttggagcaaatatcggaataagtagacatagccggtttccgttttgcacgtaaccattctaaacaattggggtttccaggatcgtttctacaaaatccagtcatgaaatcgtcacaatgttctgtcttgtaattattattaaatatttttggacagtgtttggtatttgtcttagaacaacattttgccacgctatcactatcgcccaggagataatccttttttataaaatgacatcgttgcccggatgctatataatcagtagcgtgttttaaatccttaatatattcaggagttacctcgttctgataatagattaatgatccaggacgaaatttgaaagaactacatggttctccatgaattaatacatattgtttagcaaattcaggaactataaaactactacaatgatctatcgacataccatctatcaaacaaaacttgggtttaatttctcccggagatgtttcataatagtacgtataactttcttctgcaaacttaacagctctattatattcaggataattaaaacctaattccatatatttgtctcgtatatctgctattcctggtgctattttgattctattaagagtaacagctgcccccattcttaataatcgtcagtatttaaactgttaaatgttggtatatcaacatctaccttatttcccgcagtataaggtttgttgcaggtatactgttcaggaatggttacatttatacttcttctatagtcctgtctttcgatgttcatcacatatgcaaagaacagaataaacaaaataatgtaagaaataatattaaatatctgtgaattcgtaaatacattgattgccataataattacagcagctacaatacacacaatagacattcccacagtgttgccattacctccacgatacatttgagttactaagcaataggtaataactaagctagtaagaggcaatagaaaagatgagataaatatcatcaatatagagattagaggagggctatatagagccaagacgaacaaaatcaaaccgagtaacgttctaacatcattatttttgaagattcccaaataatcattcattcctccataatcgttttgcatcatacctccatctttaggcataaacgattgctgctgttcctctgtaaataaatctttatcaagcactccagcacccgcagagaagtcgtcaagcatattgtaatatcttaaataactcatttatatattaaaaaatgtcactattaaagatggagtataatctttatgccgaactaaaaaaaatgacttgtggtcaacccctaagtctttttaacgaagacggggatttcgtagaagttgaaccgggatcatcctttaagtttctgatacctaagggattttacgcctctccttccgtaaagacgagtctagtattcgagacattaacaacgaccgataataaaatcactagtatcaatccaacaaatgcgccaaagttatatcctcttcaacgcaaagtcgtatctgaagtagtttctaatatgaggaaaatgatcgaatcaaaacgtcctctatacattactcttcacttggcgtgtggatttggtaagactattaccacgtgttatcttatggctacacacggtagaaaaaccgtcatttgcgtacccaataaaatgttaatacatcaatggaagacacaggtagaggcagtcggattggaacataagatatccatagatggagtaagtagtctattaaaggaactaaagactcaaagtccggatgtattaatagtagtcagtagacatctgacaaacgatgccttttgtaaatatatcaataagcattatgatttgttcatcttggatgaatcacatacgtataatctgatgaacaatacagcagttacaagatttttagcgtattatcctccgatgatgtgttattttttaactgctacacctagaccatctaaccgaatttattgtaacagtattattaatattgccaagttatccaatctaaaaaaaactatctatgcagtagatagtttttttgagccatattccacagataatattagacatatggtaaaacgactagatggaccatctaataaatatcatatatataccgagaagttattatctgtagacgagcctagaaatcaacttattcttgataccctggtagaagaattcaagtcaggaactattaatcgcattttagttattactaaactacgtgaacatatggtattattctacaaacgattattagattttttcggaccagaggttgtatttataggagacgcccaaaatagacgtactccagatatggtcaaatcaatcaaggaactaaatagatttatattcgtatccaccttattttattccggtactggtttagatattcctagtttggattcgttgttcatttgctcggcagtaatcaacaatatgcaaatagagcaattactagggagggtatgtcgagaaacagaactattagataggacggtatatgtatttcctaacacatccatcaaagaaataaagtacatgataggaaatttcatgcaacgaattattagtctgtctgtagataaactaggatttaaacaaaaaagttatcggaaacatcaagaatccgatcccacttctgcatgtacaacatcatccagagaagaacgtgtattaaatagaatatttaactcgcaaaatcgttaagaagtttaagcgacgatccgcatgctgcgcaggccagtgtattacccctcatagtattaatataatccaatgatacttttgtgatgtcggaaatcttaaccaatttagactgacaggcagaacacgtcatgcaatcatcatcgtcatcgataactgtagtcttgggcttctttttgcgactcttcattccggaacgcacattggtgctatccatttaggtagtaaaaaataagtcagaatatgccctataacacgatcgtgcaaaacctggtatatcgtctctatctttatcacaatatagtgtatcgacatttttattattattgacctcgtttatcttggaacatggaatgggaacatttttgttatcaacggccatctttgccttaattccagatgttgtaaaattataactaaacagtctatcatcgacacaaatgaaattcttgtttagacgtttgtagtttacgtatgcggctcgttcgcgtctcattttttcagatattgcaggtactataatattaaaaataagaatgaaataacataggattaaaaataaagttatcatgacttctagcgctgatttaactaacttaaaagaattacttagtctgtacaaaagtttgagattttcagattctgcggctatagaaaagtataattctttggtagaatggggaacatctacttactggaaaataggcgtgcaaaaggtagctaatgtcgagacgtcaatatctgattattatgatgaggtaaaaaataaaccgtttaatattgatccgggctattacattttcttaccggtatattttgggagcgtctttatttattcgaagggtaaaaatatggtagaacttggatctggaaactcttttcaaataccagatgatatgcgaagtgcgtgtaacaaagtattagacagcgataacggaatagactttctgagatttgttttgttaaacaatagatggataatggaagatgctatatcaaaatatcagtctccagttaatatatttaaactagctagtgagtacggattaaacatacccaaatatttagaaattgaaatagaggaagacacattatttgacgacgagttatactctattatagaacgctctttcgatgataaatttccaaaaatatccatatcgtatattaagttgggagaacttagacggcaagttgtagactttttcaaattctcattcatgtatattgagtccatcaaggtagatcgtataggagataatatttttattcctagcgttataacaaaatcaggaaaaaagatattagtaaaagatgtagaccatttaatacgatccaaggttagagaacatacatttgtaaaagtaaaaaagaaaaacacattttccattttatacgactatgatggaaacggaacagaaactagaggagaagtaataaaacgaattatagacactataggacgagactattatgttaacggaaagtatttctctaaggttggtagtgcaggcttaaagcaattgactaataaattagatattaatgagtgcgcaactgtcgatgagttagttgatgagattaataaatccggaactgtaaaacgaaaaataaaaaaccaatcagcatttgatttaagcagagaatgtttgggatatccagaagcggattttataacgttagttaataacatgcggttcaaaatagaaaattgtaaggttgtaaatttcaatattgaaaatactaattgtttaaataacccgagtattgaaactatatatggaaactttaaccagttcgtctcaatctttaatgtcgtcaccgatgtcaaaaaaagattattcgagtgaaataatatgcgcctttgatataggtgcaaaaaatcctgccagaactgttttagaagtcaaggataactccgttagggtattggatatatcaaaattagactggagttctgattgggaaaggcgcatagctaaagatttgtcacaatatgaatacactacagttcttctagaacgtcagcctagaaggtcgccgtatgttaaatttatctattttattaaaggctttttatatcatacatcggctgccaaagttatttgcgtctcgcctgtcatgtctggtaattcatatagagatcgaaaaaagagatcggtcgaagcatttcttgattggatggacacattcggattgcgagactccgttccggatagacgcaaattagacgatgtagcggatagtttcaatttggctatgagatacgtattagataaatggaatactaattatacaccttataataggtgtaaatctagaaattacataaaaaaaatgtaataacgttagtaacgccattatggataatctatttacctttctacatgaaatagaagatagatatgccagaactatttttaactttcatctaataagttgcgatgaaataggagatatatatggtcttatgaaagaacgcatttcctcagaggatatgtttgataatatagtgtataataaagatatacatcctgccattaagaaactagtgtattgcgacatccaacttactaaacacattattaatcagaatacgtatccggtatttaacgattcttcacaagtgaaatgttgtcattatttcgacataaactcagataatagcaatattagctctcgtacagtagagatatttgagagggaaaagtcatctcttgtatcatatattaaaactaccaataagaagagaaaggtcaattacggcgaaataaagaaaactgttcatggaggcactaatgcaaattacttttccggtaaaaagtctgacgagtatctgagtactacagttagatccaacattaatcaaccttggatcaaaaccatctctaagaggatgagagttgatatcattaatcactctatagtaacgcgtggaaaaagctctatattacaaactatagaaattatttttactaatagaacatgtgtgaaaatattcaaggattctactatgcacattattctatccaaggacaaggatgaaaaggggtgtatacacatgattgacaaattattctatgtctattataatttatttctgttgttcgaagatatcatccaaaacgagtactttaaagaagtagctaatgttgtaaaccacgtactcacggctacggcattagatgagaaattattcctaattaagaaaatggctgaacacgatgtttatggagttagcaatttcaaaatagggatgtttaacctgacatttattaagtcgttggatcataccgttttcccctctctgttagatgaggatagcaaaataaagttttttaaggggaaaaagctcaatattgtagcattacgatctctggaggattgtataaattacgtgactaaatccgagaatatgatagaaatgatgaaggaaagatcgactattttaaatagcatagatatagaaacggaatcggtagatcgtctaaaagaattgcttctaaaatgaaaaaaaacactaattcagaaatggatcaacgactagggtataagtttttggtgcctgatcctaaagccggagttttttatagaccgttacatttccaatatgtatcgtattctaattttatattgcatcgattgcatgaaatcttgaccgtcaagcggccactcttatcgtttaagaataatacagaacgaattatgatagaaattagcaatgttaaagtgactcctccagattactcacctataatcgcgagtattaaaggtaagagttatgacgcattagccacgttcactgtaaatatctttaaagaggtaatgaccaaagagggtatatccatcactaaaataagtagttatgagggaaaagattctcatttgataaaaattccgctactaataggatacgggaataaaaatccacttgatacagccaagtatcttgttcctaatgtcataggtggagtctttatcaataaacaatctgtcgaaaaagtaggaattaatctagtagaaaagattacaacatggccaaaatttagggttgttaagccaaactcattcactttctcgttttcctccgtatcccctcctaatgtattaccgacaagatatcgccattacaagatatctctggatatatcacaattggaagcgttgaatatatcatcgacaaagacatttataacggtcaatattgttttgctgtctcaatatttatctagagtgagtctagaattcattagacgtagtttatcatacgatatgcctccagaagttgtctatctagtaaacgcgataatagatagtgctaaacgaattactgaatctattactgactttaatattgatacatacattaatgacctggtggaagctgaacacattaaacaaaaatctcagttaacgattaacgagttcaaatatgaaatgctgcataactttttacctcatatgaactatacacccgatcaactaaagggattttatatgatatctttactaagaaagtttctctactgtatcttccacacttctagatatccagatagagattcgatggtttgtcatcgcatcctaacgtacggcaaatattttgagacgttggcacatgatgaattagagaattacataggcaacatccgaaacgatatcatgaacaatcacaagaacagaggcacttacgcggtaaacattcatgtactaacaactcccggacttaatcatgcattttctagtctattgagtggaaagttcaaaaagtcagacggtagttatcgaacacatcctcactattcatggatgcagaatatttctattcctaggagtgttggattttatccggatcaagtaaagatttcaaagatgttttctgtcagaaaataccatccaagtcaatatctttacttttgttcatcagacgttccggaaagaggtcctcaggtaggtttagtatctcaattgtctgtcttgagttccattacaaatatactaacgtctgagtatttggatttggaaaagaaaatttgtgagtatatcagatcatattataaagatgatataagttactttgaaacaggatttccaatcactatagaaaatgctctagtcgcatctcttaatccaaatatgatatgtgattttgtaactgactttagacgtagaaaacggatgggattcttcggtaacttggaggtaggtattactttagttagggatcacatgaatgaaattcgcattaatattggagcaggaagattagtcagaccattcttggttgtggataacggagagctcatgatggatgtgtgtccggagttagaaagcagattagacgacatgacattctctgacattcagaaagagtttccgcatgtcattgaaatggtagatatagaacaatttacttttagtaacgtatgtgaatcggttcaaaaatttagaatgatgtcaaaggatgaaagaaagcaatacgatttatgtgactttcctgccgaatttagagatggatatgtagcatcttcactagtgggaatcaatcacaattctggacccagagctattcttggatgtgctcaagctaaacaagctatctcttgtctgagctcggatatacgaaataaaatagacaatggaattcatttgatgtatccagagaggccaatcgtgattagtaaggctttagaaacttcaaagattgcggctaattgcttcggccaacatgttactatagcattaatgtcgtacaaaggtatcaatcaagaggatggaattatcatcaaaaaacaatttattcagagaggcggtctcgatattgttacagccaagaaacatcaagtagaaattccattggaaaactttaataacaaagaaagagataggtctaacgcctattcaaaattagaaagtaatggattagttagactgaatgctttcttggaatccggagacgctatggcacgaaatatctcatcaagaactcttgaagatgattttgctagagataatcagattagcttcgatgtttccgagaaatataccgatatgtacaaatctcgcgttgaacgagtacaagtagaacttactgacaaagttaaggtacgagtattaaccatgaaagaaagaagacccattctaggagacaaatttaccactagaacgagtcaaaagggaacagtcgcgtatgtcgcggatgaaacggaacttccatacgacgaaaatggtatcacaccagatgtcattattaattctacatccatcttctctagaaaaactatatctatgttgatagaagttattttaacagccgcatattctgctaagccgtacaacaataagggagaaaaccgacctgtctgttttcctagtagtaacgaaacatccatcgatacatatatgcaattcgctaaacaatgttatgagcattcaaatccgaaattgtctgatgaagaattatcggataaaatcttttgtgaaaagattctctatgatcctgaaacggataagccttatgcatccaaagtattttttggaccaatttattacttgcgtctgagacatttaactcaggacaaggcaaccgttagatgtagaggtaaaaagacgaagctcattagacaggcgaatgagggacgaaaacgtggaggaggtatcaagttcggagaaatggagagagactgtttaatagcgcatggtgcagccaatactattacagaagttttgaaagattcggaagaagattatcaagatgtgtatgtttgtgaaaattgtggagacatagcagcacaaatcaagggtattaatacatgtcttagatgttcaaaacttaatctctctcctctcttaacaaaaattgataccacgcacgtatctaaagtatttcttactcaaatgaacgccagaggcgtaaaagtcaaattagatttcgaacgaaggcctccttcgttttataaaccattagataaagttgatctcaagccgtcttttctggtgtaatattctagtttggtagtagatacatatcaatatcatcaaattcgagatccgaattataaaatgggcgtggattgttaactatagaatcggacgtctgatattcgaaaatctgtggagtttcaggttttggtggaggtgtaactgctacttgggatactgaagtctgatattcagaaagctgtggatgttctggttcggcatccaccgatggtgtcacatcactaatcggttcggtaacgtctgtggatggaggtgctacttctacagaacctgtagcctcagttgtcaacggagatacatttttaatgcgagaaaatgtataatttggtaatggtttcttatgtggatctgaagaagaggtaagatatctactagaaagataccgatcacgttctagttctcttttgtagaacttaactttttctttctccgcatctagttgatattccaacctcttcacgttactacgttcagattccaattcacgttcgcatgggttacctccgcagtttttacgagcgatttcacgttcagccttcatgcgtctctccctctctctatcgagtttatcagagcagtctttctgaaggcgatcgaactccataaatttctccaacgctttgattgtttccatagatttccgaagttcagcttttaggactgtgattctttttctttcgaattcacagctggatgtacaaccgtttccattaccgccatctctaagtttcttttctagatcggcaacatttcatccccatgccttttacattcctcgagtctactgtcgtcgaaatatcgttccagctccttttcgacatcaataactttagcacgttgtctctcaagctctcttttgtagttatctgattccctggcacgtttaagatcttcatgcaattgagtcagctcttaacttcctctcttgcttcttcgtcatagtacgcgcaatcactgtgagatccattgttaccacgtctacactcggcgagctcgcgtttaagagattcaatttcccgtttgtattggtccatgtttccattgctaccaccattagatttacaggctgctagttgtcgttcgagatcagaaatacgggttttcttggaattgatttcgtcgatgtacttggcatcgaaacacttattaagttctttttccaattctacgattttatttctttcgcgagtcaattccctcctgtagtaactatctgttttgtcagattcacgctctctacgtagactttcttgcaagttactaatttgttccctagcacgtccgagtttagttttatatgctgaatagagttctgattcatcctttgagcagatctctagcgatcgtttaagattcctaattctagtctttagcctatttacctcctcagaagatgttccgttaccgttgcgtttacactcgttaagctgtctatcaagatccatgattctatctctaagacgttgcatctctctttccatatcagcattgctttcattattacgtctgcagtcactcaactgtctttcaatatctgagattctatctctaagacgtcgcatctctctctgtttcggcattggtttcattattacgtttacagtcgttcaactgtctttcaagatctgatattctagattggagtctgctaatctctgtagcattttcacggcattcactcagttgtctttcaagatctgaaattttagattggagtctgctaatctctgtaagatttcctcctccgctctcgatgcagtcggtcaacttattctctagttctctaatacgcgaacgcagtgcatcaacttcttgcgtgtcttcctggttgcgtgtacattcatcgagtctagattcgagatctctaacgcgtcgtcgttcttcctcaagttctctgcgtactacagaaagcgtgtccttatcttgttgatatttagcaatttctgattctagagtactgattttgcttacgtagttactaatatttgtcttggccttatcaagatcctccttgtatttgtcgcattccttgatatccctacgaagtctggacagttcccattcgacattacgacgtttatcgatttcagctcggagatcgtcatcgcgttgttttagccacatacgactgagttcaagttctcgttgacaagatccatctacttttccattcctaatagtatccagttccttttctagttctgaacgcatttctcgttccctatcaagcgattctctcaattctcggatagtcttcttatcaatttctaataaatctgaaccatcatctgtcccattttgaatatccctgtgttctttgatctcttttgtaagtcggtcgattctttcggttttataaacagaatccctttccaaagtcctaatcttactgagtttatcactaagttctgcattcaattcggtgagttttctcttggcttcttccaactctgttttaaactctccactatttccgcattcttcctcgcatttatctaaccattcaattagtttattaataactagttggtaatcagcgattcctatagccgttcttgtaattgtgggaacataattaggatcttctaatggattgtatggcttgatagcatcatctttatcattattagggggatggacaaccttaattggttggtcctcatctcctccagtagcgtgtggttcttcaataccagtgttagtaataggcttaggcaaatgcttgtcgtacgcgggcacttcctcatccatcaagtatttataatcgggttctacttcagaatattcttttctaagagacgcgacttcgggagttagtagaagaactctgtttctgtatctatcaacgctggaatcaatactcaagttaaggatagcgaatacctcatcgtcatcatccgtatcttctgaaacaccatcatatgacatttcatgaagtctaacgtattgataaatagaatcagatttagtattaaacagatccttaacctttttagtaaacgcatatgtatattttagatctccagatttcataatatgatcacatgccttaaatgtcagtgcttccatgatataatctggaacactaatgggtgacgaaaaagatacagcaccatatgctacgttgataaataaatctgaaccactaagtagataatgattaatgttaagaaagaggaaatattcagtgtataggtatgtcttggcgtcatatcttgtactaaacacgctaaacagtttgttaatgtgatcaatttccaatagattaattagagcagcgggaataccaacaaacatattaccacatccgtattttctatgaatatcacatatcatgttaaaaaatcttgatagaagagcgaatatctcgtctgacttaatgagtcgtagttcagcagcaacataagtcataactgtaaatagaacatactttcctgtagtgttgattctagactccacatcaacaccattattaaaaatagttttatatacatctttaatctgctctccgttaatcgtcgaacgttctagtatacggaaacactttgatttcttatctgtagttaatgacttagtgatatcacgaagaatattacgaattacatttcttgtttttcttgagagacctgattcagaactcaactcatcgttccatagtttttctacctcagtggcgaaatctttggagtgcttggtacatttttcaataaggttcgtgacctccatttattataaaaaatttattcaaaacttaactacaatcgggtaattataaaatcgtagatctcccatgtggcggaatactaccatctatcgcatgtggatggacagtaggtaatggccatgggaacagtaatgtttgcatatttatctttcttgccagtattactgcatattgtcccaatgtttcgatgtgatgttctaacctatcaactgccgctgtatcacaacaatagtgtccgatgaaattaagattatgatccaatgtgtttaatatatgattatcaagtcttatacgatccgcgtcttttttgacaggatcaggttcttctacaggaagaagtttcggcctcttatgatattcatgtctgggaaacggtggtctagggtgaggctccggtatcggagtgggttttggattataatcatcatcgtctatgacatcatcttcgacttcgatatttattttgctatcttgatgatgtcctgtatcagttgcattttcagcactcgactgaatattagcgcattcattgtctattattaccatatttctaaacccaaaatgtatgtgttgaacatcagtactatcgttgatgagtcttatagcatgaattcgcttatcgttatcgggtttatcttctgtcaccttagcaattccttttttattaaactctacataatcatatccatttctattgtttgttctaatataaacgagtatagcatcattgctaaatttttcaatagtatcaaaaacagaatatcctaaaccatataatatatattcaggaacactcaaactaaatgtccaggattctcctaaatacgtaaactttaatagtgcgaaatcattcaaaaatctaccacttatagatagatagtacataaatgcgtatagtagtctacctatctctttattatgaaaaccggcattacgatcatatatgtcgtgatatacctgtgatccgtttacgttaaaccataaatacatgggtgatcctataaacatgaatttatttctaattctcagagctatagttaattgaccgtgtaatatttgcttacatgcatacttgatacgcttattaataagatttttatcattgctcgttatttcagaatcgtatatataaggagtaccatcgtgattcttaccagatattatacaaaatactatatataaaatatattgacccacgttagtaatcatataaatgtttaacgttttaaattttgtattcaatgatccattatcatacgctatcatggtcttgtaatattcattctttaaaatataatattgtgttagccattgcattggagctcctaatggagattttctattctcatccattttaggataggctttcataaagtccctaataacttcgtgaataatgtttctatgttttctactgatgcatgtatttgcttcgatttttttatcccatgtttcatctatcatagatttaaacgcagtaatgctcgcaacattaacatcttgaaccgttggtacaattccgttccataaatttataatgttcgccatttatataactcattttttgaatatacttttaattaacaaaagagttaagttactcatatggacgccgtccagtctgaacatcaatctttttagccagagatatcatagccgctcttagagtttcagcgtgattttccaacctaaatagaacttcatcgttgcgtttacaacacttttctatttgttcaaactttgttgttacattagtaatctttttttccaaattagttagccgttgtttgagagtttcctcattgtcgtcttcatcggctttaacaattgcttcgcgtttagcctctggctttttagcagcctttgtagaaaaaaattcagttgctggaattgcaagatcgtcatctccggggaaaagagttccgtccatttaaagtacagattttagaaactgacactctgcgttatttatatttggtacaacacatggattataaatattgatgttaataacatcagaaaatgtaaagtctatacattgttgcatcgtgttaaattttctaatggatctagtattattgggtccaacttctgcctgaaatccaaatatggaagcggatacaaaaccgtttcctggataaaccacacatctccacttttgctttacatcagaaattgtgtcgttgacatcttgaactctcctatctaatgccggtgttccacctatagattttgaatattcgaatgctgcatgagtagcattaaattccttaatattgccataattttcatatattgagtaaccctggataaaaagtaaacacaccgcagccgtcgctaccacaataaaaaaaattgatagagagttcatttataatctattagaagctgacaaaatttttttacacgcatcagacaatgctttaataaatagttcaacatctacttttgtcatatcgaaccgatggtatgattctaacctagaattacatccgaaaaagttgactatgttcatagtcattaagtcattaacaaacaacattccagactctggattataagacgatactgtttcgtcacaattacctaccttaatcatgtgattatgaatattggctattagagcaccttctaagaaatctataatatctttgaaacacgatttaaaatcaaaccacgaatatacttctacgaagaaagttagtttacccataggagaaataactataaatggagatctaaatacaaaatccggatctatgatagttttaacattattatattctctattaaatacctccacatctaaaaatgttaattttgaaactatgtcttcgtttattaccgtacctgaactaaacgctataagctctattgtttgagaactctttaaacgatattcttgaaatacatgtaacaaagtttcctttaactcggtcggtttatctaccatagttacagaatttgtatccttatctataatataataatcaaaatcgtataaagttatataattatcgcgttcagattgggatcttttcaaatagactaaaaaccccatttctctagtaagtatcttatgtatatgtttgtaaaatatcttcatggtgggaatatgctctaccgcagttagccattcctcattgacagcggtagatgtattagacaaaactattccaatgtttaacaagggccattttacgagattattaaatccttgtttgataaatgtagccaatgagggttcgagttcaacgacgattgaattctcttcccgcggatgctgcatgatgaacgacgggatgttgttcgattgatttggaattctttttcgactttttgtttatattaaatattttaaaatttatagcggatagcaattcatgtaccacggataatgtagacgcgtattgcgcatcgatatctttattattagataaatttatcaataaatgtgagaagtttgcctcgttaaggtcttccatttaaatattatataaacatttgtgtttgtaacttattcgtcttttatggaatagttttttactagtaaagctgcaattacacactttgtccgtaaaacataaatataaacaccagcttttatcaatcgttccaaaaagtcgacggcggacatttttaacatggcatctattttaaatacacttaggtttttggaaaaaacatcattttataattgtaacgattcaataactaaagaaaagattaagattaaacataagggaatgtcatttgtattttataagccaaagcattctaccgttgttaaatacttgtctggaggaggtatatatcatgatgatttggttgtattggggaaggtaacaattaataatctaaagatgatgctattttacatggatttatcatatcatggagtgacaagtagtggagcaatttacaaattgggatcgtctatcgatagactttctctaaataggactattgttacaaaagttaataattatgatgatacattttttgacgacgatgattgatcgctattgcacaattttgtttttgtactttctaatatagtgtttaggttctttttcatatgagaatattgatttactaaaatatctatgtttaacttttgttctatgacgtccttatcggcggtatcggtacatatacgtaattcaccttcacaaaatacggagtcttcgataataatagccaatcgattattggatctagctgtctgtatcatattcaacatgtttaatatatcctttcgtttcccctttacaggcatcgatcgtagcatattttccgcgtctgatatggaaatgttaaaactacaaaaatgcgtaatgttagcccgtcctaatattggtacgtgtctataagtttggcatagtagaataatagacgtgtttaaatgccttccaaagtttaagaattctattagagtattgcattttgatagtttatcgcctacatcatcaaaaataagtaaaaagtgtgctgattttttatgattttgtgcgacagcaatacatttttctatgttacttttagttcgtatcagattatattctagagattcctgactactaacgaaattaatatgatttggccaaatgtatccatcataatctgggttataaacgggtgtaaacaagaatatatgtttatattttttaactagtgtagaaaacagagatagtaaatagatagtttttccagatccagatcctcctgttaaaaccattctaaacggcatttttaataaattttctcttgaaaattgtttttcttggaaacaattcataattatatttacagttactaaattaatttgataataaatcaaaatatggaaaactaaggttgttagtagggaggagaacaaagaaggcacatcgtgatataaataacatttattatcatgatgacaccagaaaacgacgaagagcagacatctgtgttctccgctactgtttacggagacaaaattcagggaaagaataaacgcaaacgcgtgattggtctatgtattagaatatctatggttatttcactactatctatgattaccatgtccgcgtttctcatagtgcgcctaaatcaatgcatgtctgctaacgaggctgctattactgacgccgctgttgccgttgctgctgcatcatctactcatagaaaggttgcgtctagcactacacaatatgatcacaaagaaagctgtaatggtttatattaccagggttcttgttatatattacattcagactaccagttattctcggatgctaaagcaaattgcactgcggaatcatcaacactacccaataaatccgatgtcttgactacctggctcattgattatgttgaggatacatggggatctgatggtaatccaattacaaaaactacatccgattatcaagattctgatgtatcacaagaagttagaaagtatttttgtgttaaaacaatgaactaatatttatttttgtacattaataaatgaaatcgcttaatagacaaactgtaagtaggtttaagaagttgtcggtgccggccgctataatgatgatactctcaaccattattagtggcataggaacatttctgcattacaaagaagaactgatgcctagtgcttgcgccaatggatggatacaatacgataaacattgttatttagatactaacattaaaatgtctacagataatgcggtttatcagtgtcgtaaattacgagccagattgcctagacctgatactagacatctgagagtattgtttagtattttttataaagattattgggtaagtttaaaaaagaccaataataaatggttagatattaataatgataaagatatagatattagtaaattaacaaattttaaacaactaaacagtacgacggatgctgaagcgtgttatatatacaagtctggaaaactggttaaaacagtatgtaaaagtactcaatctgtactatgtgttaaaaaattctacaagtgacaacaaaaaatgaattaataataagtcgttaacgtacgccgccatggacgccgcgtttgttattactccaatgggtgtgttgactataacagatacattgtatgatgatctcgatatctcaatcatggactttataggaccatacattataggtaacataaaaactgtccaaatagatgtacgggatataaaatattccgacatgcaaaaatgctactttagctataagggtaaaatagttcctcaggattctaatgatttggctagattcaacatttatagcatttgtgccgcatacagatcaaaaaataccatcatcatagcatgcgactatgatatcatgttagatatagaagataaacatcagccattttatctattcccatctattgatgtttttaacgctacaatcatagaagcgtataacctgtatacagctggagattatcatctaatcatcaatccttcagataatctgaaaatgaaattgtcgtttaattcttcattctgcatatcagacggcaatggatggatcataattgatgggaaatgcaatagtaattttttatcataaaagttgtaaagtaaataataaaacaataaatattgaactagtagtacgtatattgagcaatcagaaatgatgctggtacctcttatcacggtgaccgtagttgcgggaacaatattagtatgttatatattatatatttgtaggaaaaagatacgtactgtctataatgacaataaaattatcatgacaaaattaaaaaagataaagagttctaattccagcaaatctagtaaatcaactgatagcgaatcagactgggaggatcactgtagtgctatggaacaaaacaatgacgtagataatatttctaggaatgagatattggacgatgatagcttcgctggtagtttaatatgggataacgaatccaatgttatggcgcctagcacagaacacatttacgatagtgttgctggaagcacgctgctaataaataatgatcgtaatgaacagactatttatcagaacactacagtagtaattaatgaaacggagactgttaaagtacttaatgaagataccaaacagaatcctaactattcatccaatcctttcgtaaattataataaaaccagtatttgtagcaagtcaaatccgtttattacagaacttaacaataaatttagtgagaataatccgtttagacgagcacatagcgatgattatcttaataagcaagaacaagatcatgaacacgatgatatagaatcatcggtcgtatcattggtgtgattagtttcctttttataaaattgaagtaatatttagtattattgctgccgtcacgttgtacaaatggagatattccctgtattcggcatttctaaaattagcaattttattgctaataatgactgtagatattatatagatacagaacatcaaaaaattatatctgatgagatcaatagacagatggatgaaacggtacttcttaccaacatcttaagcgtagaagttgtaaatgacaatgagatgtaccatcttattcctcatagattatcgacgattatactctgtattagttctgtcggaggatgtgttatctctatagataatgacatcaatggcaaaaatattctaacctttcccattgatcatgctgtaatcatatccccactgagtaaatgtgtcgtagttagcaagggtcctacaaccatattggttgttaaagcggatatacctagcaaacgattggtaacatcgtttacaaacgacatactatatgtaaacaatctgtcactgattaattatttgccgttgtctgtattcattattagacgagtcaccgactatttggatagacacatatgcgatcagatatttgctaataataagtggtattcccttataaccatcgacgataagcaatatcctattccatcaaactgtataggtatgtcctctgccaagtacataaattctagcatcgagcaagatactttaatccatgtttgtaacctcgagcatccgttcgactcagtatacaaaaaaatgcagtcgtacaattctctacctatcaaggaacaaatattgtacggtagaattgataatataaatatgagcattagtatttctgtggattaatagatttctagtatggggatcattaatcatctctaatctctaaatacctcataaaacgaaaaaaaagctattatcaaatactgtacggaatggattcattctcttctctttttatgaaactctgttgtatatctactgataaaactggaagcaaaaaatctgatagaaagaataagaataagatcaaggattatatggaacacgattattataaaataacaatagttcctggttcctcttccacgtctactagctcgtggtattatacacatgcctagtaatagtctctttgcgttgacggaaagcagactagaaataacaggctaaaatgttcagacaccataatagttcccaacccagataataacagagttccatcaacacattcctttaaactcaatcccaaacccaaaaccgttaaaatgtatccggccaattgatagtagataatgaggtgtacagcgcatgataatttacacagtaaccaaaatgaaaacactttagtaattataagaaatatagacggtaatgtcatcatcaacaatccaataatatgcctgagagtaaacattgatggataaaacaaaaatgctccgcataactctatcatggcaataacacaaccaaatacttgtaagattcctaaattagtagaaaatacaacggatatcgatgtataagtgatctcgagaaataataagaataaagtaatgcccgtaaagataaacatcaacattgtttggtaatcattaaaccaattagtatgaagttgaactaatttcacagtagattttattccagtattatccccgcatgtatacgtacctggtaagatatctttatattccataatcaatgagacatcactatccgataacgaatgaagtctagcactagtatgccatttacttaatatggtcgtcttggaagttttattataagttaaaatatcatggttatccaatttccatctaatatactttgtcggattatctatagtacacggaataatgatggtatcattacatgctgtatactctatggtctttgtagttgttataacaaccaacgtatagaggtatatcaacgatattctaactcttgacattttttatttatttaaaatgatacctttgttatttattttattctattttgctaacggtattgaatggcataagtttgaaacgagtgaagaaataatttctacttacttattagacgacgtattatacacgggtgttaatggggcggtatacacattttcaaataataaactaaacaaaactggtttaactaataataattatatcacaacatctataaaagtagaggatgcggataaggatacattagtatgcggaaccaataacggaaatcccaaatgttggaaaatagacggttcagacgacccaaaacatagaggtagaggatacgctccttatcaaaatagcaaagtaacgataatcagtcacaacggatgtgtactatctgacataaacatatcaaaagaaggaattaaacgatggagaagatttgacggaccatgtggttatgatttatacacggcggataacgtaattccaaaagatggtttacgaggagcattcgtcgataaagatggtacttatgacaaagtttacattcttttcactgatactatcggctcaaagagaattgtcaaaattccgtatatagcacaaatgtgcctaaacgacgaaggtggtccatcatcattgtctagtcatagatggtcgacgtttctcaaagtcgaattagaatgtgatatcgacggaagaagttatagacaaattattcattctagaactataaaaacagataatgatacgatactatatgtattcttcgatagtccttattccaagtccgcattatgtacctattctatgaataccattaaacaatctttttctacgtcaaaattggaaggatatacaaagcaattgccgtctccagctcctggtatatgtttaccagctggaaaagttgttccacataccacgtttgaagtcatagaaaaatataatgtactagatgatattataaagcctttatctaaccaacctatcttcgaaggaccgtctggtgttaaatggttcgatataaaggagaaggaaaatgaacatcgggaatatagaatatacttcataaaagaaaattctatatattcgttcgatacaaaatctaaacaaactcgtagctcgcaagtcgatgcgcgactattttcagtaatggtaacttcgaaaccgttatttatagcagatatagggataggagtaggaatgccacaaatgaaaaaaatacttaaaatgtaatcttaatcgagtacaccacacgacaatgaacaaacataagacagattatgctggttatgcttgctgcgtaatatgcggtctaattgttggaattatttttacagcgacactattaaaagttgtagaacgtaaattagttcatacaccatcaatagataaaacgataaaagatgcatatattagagaagattgtcctactgactggataagctataataataaatgtatccatttatctactgatcgaaaaacctgggaggaaggacgtaatgcatgcaaagctctaaatccaaattcggatctaattaagatagagactccaaacgagttaagttttttaagaagcattagacgcggatattgggtaggagaatccgaaatattaaaccagacaaccccatataattttatagctaagaatgccacgaagaatggaactaaaaaacggaaatatatttgtagcacaacgaatactcccaaactgcattcgtgttacactatataacaattacactacatttttatcataacactacttcggttagatgttttagaaaaaaataaatatcgccgtaccgttcttgtttttataaaaataacaattaacaattatcaaattttttctttaatattttacgtggttgaccattcttggtggtaaaataatctcttagtgttggaatggaatgctgtttaatgtttccacactcatcgtatattttgacgtatgcagtcacatcgtttacgcaatagtcagactgtagttctatcatgcttcctacattagaaggaggaacagttttaaagtctcttggttttaatctattaccgttagttttcatgaaatcctttgttttatccacttcacattttaaataaatgtccactatacattcttttgttaattttactagatcgtcatgggtcatagaatttataggttccgtagtccatggatccaaactagcaaacttcgcgtatacggtatcgcgattagtgtatacaccaactgtatgaaaattaagaaaacagtttaatagatcaacagaaatatttaatcctccgtttgatacagatgcgccatatttatggatttcggattcacacgttgtttgtctgaggtgttcgtctagtgttgcttctacgtaaactttgattcccatatattctttattgtcagaatcgcataccgatttatcatcatacactgtttgaaaactaaatggtatacacatcaaaataacaaatactaacgagtacattctgcaatattgttatcgtaattggaaaaatagtgttcgagtgagttggattatgtgagtattggattgtatattttattttatattttgtaataagaataaaatgctaatgtcaagtttattccaatagatgtcttattaaaaacatatataataaataacaatggctgaatggcataaaattatcgaggatatctcaaaaaataataagttcgaggatgccgccatcgttgattacaagactacaaagaatgttctagctgctattcctaacagaacatttgccaagattaatccgggtgaaattattcctctcatcactaatcgtaatattctaaaacctcttattggtcagaaatattgtattgtatatactaactctctaatggatgagaacacgtatgctatggagttgcttactgggtacgcccctgtatctccgatcgttatagcgagaactcataccgcacttatatttttgatgggtaagccaacaacatccagacgtgacgtgtatagaacgtgtagagatcacgctacccgtgtacgtgcaactggtaattaaaataaaaagtaatattcatatgtagtgtcaattttaaatgatgatgatgaaatggataatatccatattgacgatgtcaataatgccggtattggcatacagttcatcgatttttagatttcattcagaggatgtggaattatgttatgggcatttgtattttgataggatctataatgtagtaaatataaaatataatccgcatattccatatagatataattttattaatcgcacgttaaccgtagatgaactagacgataatgtcttttttacacatggttattttttaaaacacaaatatggttcacttaatcctagtttgattgtctcattatcaggaaacttaaaatataatgatatacaatgctcagtaaatgtatcgtgtctcattaaaaatttggcaacgagtacatctactatattaacatctaaacataagacttattctctacatcggtccacgtgtattactataataggatacgattctattatatggtataaagatataaatgacaagtataatgacatctatgattttactgcaatatgtatgctaatagcgtctacattgatagtgaccatatacgtgtttaaaaaaataaaaatgaactcttaattatgctatgctattagaaatggataaaatcaaaattacggttgattcaaaaattggtaatgttgttaccatatcgtataacttggaaaagataactattgatgtcacacctaaaaagaaaaaagaaaaggatgtattattagcgcaatcagttgctgtcgaagaggcaaaagatgtcaaggtagaagaaaaaaatattatcgatattgaagatgacgatgatatggatgtagaaagcgcgtaatacgatctataaaaataagtatataaatactttttatttactgtactcttactgtgtagtggtgataccctactcgattatttttttaaaaaaaaaatacttattctgattcttctagccatttccgtgttcgtttgaatgccacatcgacgtcaaagataggggagtagttgaaatctagttctgcattgttggtacgcacctcaaatgtagtgttggatatcttcaacgtatagttgttgagtagtgatggttttctaaatagaattctcttcatatcattcttgcacgcgtacatttttagcatccatcttggaatcctagatccttgttctattcccaatggtttcatcaatagaagattaaacatatcgtacgaacacgatggagagtaatcgtagcaaaagtaagcatttcctttaatcttagatcccggatactggatatattttgcagccaacacgtgcatccatgcagcatttcctacatatacccggctatgcaccgcgtcatcatcgactgtacgatacataatgttaccgtgttgcttacattgctcgtaaaagactttcatcaatttgtctccttctccgtaaattccagtgggtcttaggcaacaagtatacaattttgctccattcatgattacggaattattggctttcataaccagttgctcggccatacgtttactttttgcgtatacatgtcctggtgatatatcataaagggtatgctcatggccgatgaatggatcaccgtgtttattgggtcctattgcttccatgctactagtatagatcaaatacttgattcctaggtccacacaagctgccaaaatagtctgtgttccataatagtttactttcatgatttcattatcggtgtattttccaaatacatccactagagcagccgtatgaataatcagatttaccccatctagcgcttctctcaccttatcaaagtcgtttatatcacattgtatatagtttataaccttaactttcgaggttattggttgtggatcttctacaatatctatgactctgatttcttgaacatcatctgcactaattaacagttttactatatacctgcctagaaatccggcaccaccagtaaccgcgtacacggccattgctgccactcataatatcagactacttattctattttactaaataatggctgtttgtataatagaccacgataatatcagaggagttatttactttgaaccagtccatggaaaagataaagttttaggatcagttattggattaaaatccggaacgtatagtttgataattcatcgttacggagatattagtcaaggatgtgattccataggcagtccagaaatatttatcggtaacatctttgtaaacagatatggtgtagcatatgtttatttagatacagatgtaaatatatctacaattattggaaaggcgttatctatttcaaaaaatgatcagagattagcgtgtggagttattggtatttcttacataaatgaaaagataatacattttcttacaattaacgagaatggcgtttgatatatcagttaatgcgtctaaaacaataaatgcattagtttacttttctactcagcaaaataaattagtcatacgtaatgaagttaatgatacacactacactgtcgaatttgatagggacaaagtagttgacacgtttatttcatataataaacataatgacaccatagagataagaggggtgcttccagaggaaactaatattggttgcgcggttagtatgacttacttgtataataagtatagttttaaactgattttagcagaatatataagacacagaaatactatatccggcaatatttattcggcattgatgacactagatgatttggctattaaacagtatggagacattgatctattatttaatgagaaacttaaagtagactccgattcgggactatttgactttgtcaactttgtaaaggatatgatatgttgtgattctagaatagtagtagctctatctagtctagtatctaaacattgggaattgacaaataaaaagtataggtgtatggcattagccgaacatatatctgatagtattccaatatctgagctatctagactacgatacaatctatgtaagtatctacgcgggcacactgagagcatagaggatgaatttgattattttgaagacgatgattcgtctacatgttctgccgtaaccgacagggaaacggatgtataattttttttatagcgtgaaggatatgataaaaaatataattgttgtatttatcccattccaatcaccttatatgattctgtaacacaataaaggagtctcatagatgtatagaggtcagatactggtttgataaactgtttattccacataagtatgtttgactttatggttagacccgcatactttaacaaatcactgaaaattggagttaggtattgacctctcagaatcagttgccgttctggaacattaaatgtattttttatgatatactccaacgcatttatgtgggcatacaacaagtcattactaatggagtattccaagagttttagttgtctagtatttaacaagagaagagatttcaacagactgtttatgaactcgaatgccgcctcattgtcgcttatattgatgatgtcgaattctcccaatatcatcactgatgagtagctcatcttgttatcgggatccaagttttctaaagatgtcattaaaccctcgatcatgaatggatttatcatcatcgtttttatgttggacatgagcttagtccgtttgtccacatctatagacgacgatttctgaattatttcatatatccctctctttaactccaggaacttgtcaggatggtctactttaatatgttctcgtctaagagatgaaaatctttggatggttgcacgcgacttttctctaaaggatgacgttgcccaagatcctctcttaaatgaatccatcttatccttggacaagatggacagtctattttccttagatggtttaatatttttgttacccatgatctataaaggtagacctaatcgtctcggatgacctatatatttattttcagttttattatacgcataaattgtaaaaaatatgttaggtttacgaaaatgtctcgtggggcattaatcgtttttgaaggattggacaaatctggaaaaacaacacaatgtatgaacatcatggaatctataccggcaaacacgataaaatatcttaactttcctcagagatccactgtcactggaaagatgatagatgactatctaactcgtaaaaaaacctataatgatcatatagttaatctattattttgtgcaaatagatgggagtttgcatcttttatacaagaacaactagaacagggaattactttaatagttgatagatacgcattttctggagtagcgtatgccgccgctaaaggcgcgtcaatgactctcagtaagagttatgaatctggattgcctaaacccgacttagttatattcttggaatctggtagcaaagaaattaatagaaacgtcggcgaggaaatttatgaagatgttacattccaacaaaaggtattacaagaatataaaaaaatgattgaagaaggagatattcattggcaaattatttcttctgaattcgaggaagatgtaaagaaggagttgattaagaatatagttatagaggctatacacacggttactggaccagtggggcaactgtggatgtaatagtgaaattacattttttataaatagatgttagtacagtgttataaatggatgaagcatattactctggcaacttggaatcagtactcggatacgtgtccgatatgcataccgaactcgcatcaatatctcaattagttattgccaagatagaaactatagataatgatatattaaacaaggacattgtaaattttatcatgtgtagatcaaacttggataatccatttatctctttcctagatactgtatatactattatagatcaagagaactatcagaccgaattgattaattcattagacgacaatgaaattatcgattgtatagttaataagtttatgagcttttataaggataacctagaaaatatagtagatgctatcattactctaaaatatataatgaataatccagattttaaaactacgtatgccgaagtactcggttccagaatagccgatatagatattaaacaagtgatacgtaagaatatactacaattgtctaatgatatccgcgaacgatatttgtgaaaaatattaaaaaaaaatactttttttattaaatgacgtcgcttcgcgaatttagaaaattatgctgtgatatatatcacgcatcaggatataaagaaaaatctaaattaattagagactttataacagatagggatgataaatatttgatcattaagctattgcttcccggattagacgatagaatttataacatgaacgataaacaaattataaaattatatagtataatatttaaacaatctcaggaagatatgctacaagatttaggatacggatatataggagacactattaggactttcttcaaagagaacacagaaatccgtccacgagataaaagcattttaactttagaagaagtggatagttttttaactacgttatcatccgtaactaaagaatcgcatcaaataaaattattgactgatatcgcatccgtttgtacatgtaatgatttaaaatgtgtagtcatgcttattgataaagatctaaaaattaaagcgggtcctcggtacgtacttaacgctattagtcctcatgcctatgatgtgtttagaaaatctaataacttgaaagagataatagaaaatgcatctaaacaaaatctagactctatatctatttctgttatgactccaattaatcccatgttagcggaatcgtgtgattctgtcaataaggcgtttaaaaaatttccatcaggaatgtttgcggaagtcaaatacgatggtgaaagagtacaagttcataaaaataataacgagtttgccttctttagtagaaacatgaaaccagtactctctcataaagtggattatctcaaagaatacataccgaaagcatttaaaaaagctacgtctatcgtattggattctgaaattgttcttgtagacgaacataatgtaccgctaccgtttggaagtttaggaatacacaaaaagaaagaatataaaaactctaacatgtgtttgttcgtgtttgactgtttgtactttgatggattcgatatgacggacattccattgtacgaacgaagatcttttctcaaagatgttatggttgaaatacccaatagaatagtattctcagagttgacgaatattagtaacgagtctcagttaactgacgtattggatgatgcactaacgagaaaattagaaggattggtcttaaaagatattaatggagtatacgaaccgggaaagagaagatggttaaaaataaagcgagactatttgaacgagggttccatggcagattctgccgatttagtagtactaggtgcctactatggtaaaggagcaaagggtggtatcatggcagtctttctaatgggttgttacgacgatgaatccggtaaatggaagacggttaccaagtgttcaggacacgatgataatacgttaagggagttgcaagaccaattaaagatgattaaaattaacaaggatcccaaaaaaattccagagtggttagtagttaataaaatctatattcccgattttgtagtagaggatccgaaacaatctcagatatgggaaatttcaggagcagagtttacatcttccaagtcccataccgcaaatggaatatccattagatttcctagatttactaggataagagaggataaaacgtggaaagaatctactcatctaaacgatttagtaaacttgactaaatcttaatagttacatacaaactgaaaattaaaataacactatttagttggtggtcgccatggatggtgttattgtatactgtctaaacgcgctagtaaaacatggcgaggaaataaatcatataaaaaatgatttcatgattaaaccatgttgtgaaagagtttgtgaaaaagtcaagaacgttcacatcgacggacaatctaaaaacaatacagtgattgcagatttgccatatctggataatgcggtatccgatgtatgcaattcactgtataaaaagaatgtatcaagaatatccagatttgctaatttgataaagatagatgacgatgacaagactcctactggtgtatataattattttaaacctaaagatgccattcctgttatcatatctataggaaaggataaagatgtctgtgaactattaatctcatctgataaagcgtgtgcgtgtatagagttaaattcatataaagtagccattcttcccatggatgtttccttttttaccaaaggaaatgcatcattgattattctcctgtttgatttctctatcgatgcggcacctctcttaagaagtgtaaccgataataatgttattatatctagacaccagcgtctacatgacgagcttccgagttccaattggttcaagttttacataagtataaagtccgactattgttctatattatatatggttgttgatggatctgtgatgcatgcgatagctgataatagaactcacgcaattattagcaaaaatatattagacaatactacgattaacgatgagtgtagatgctgttattttgaaccacagattaggattcttgatagagatgagatgctcaatggatcatcgtgtgatatgaacagacattgtattatgatgaatttacctgatgtaggcgaatttggatctagtatgttggggaaatatgaacctgacatgattaagattgctctttcggtggctggtaatttaataagaaatcgagactacattcccgggagacgaggatatagctactacgtttacggtatagcctctagataatttttttaagcacgaaataaaaaacataattttaaaccaatctatttcatactattttgtgtgatcaccatggacataaagatagatattagtatttctggtgataaatttacggtgactactaggagggaaaatgaagaaagaaaaaaatatctacctctccaaaaagaaaaaactactgatgttatcaaacctgattatcttgagtacgatgacttgttagatagagatgagatgtttactattctagaggaatattttatgtacagaggtctattaggcctcagaataaaatatggacgactctttaacgaaattaaaaaattcgacaatgatgcggaagaacaattcggtactatagaagaactcaagcagaaacttagattaaattctgaagagggagcagataactttatagattatataaaggtacaaaaacaggatatcgtcaaacttactgtatacgattgcatatctatgataggattgtgtgcatgcgtggtagatgtttggagaaatgagaaactgttttctagatggaaatattgtttacgagcgattaaactgtttattgatgatcacatgcttgataagataaaatctatactgcagaatagactagtatatgtggaaatgtcatagaaagttaaaagttaatgagagcaaaaatatataaggttgtattccatatttgttattttttctgtaatagttaaaaaaatacattcgatggtctatctatcagattattatgtgttataaggtactttttctcataataaactagagtatgagtaagatagtgtttttcaaaacatataaatctaaaattgatggatgagatatacagctattaatttcgaaaatatattttaatctgataactttaaacatggatttttgatggtggtttaacgttttaaaaaaagattttgttattgtagtatatgataatattaaaagatggatataaagaatttgctgactgcatgtactattttttacattactacattggctacggcagatatacctacttcgtcactgccacacgctccggtaaacggggcatgtgacgagggagaatatcttgataagaggcataatcaatgttgtaatcagtgtccacctggagaatttgccaaggtcagatgtaatggtaacgataacacaaaatgtgaacgctgcccacctcatacatataccgcaatccccaattactctaatggatgtcatcaatgtagaaaatgcccaacaggatcatttgataaggtaaagtgtaccggaacacagaacagtaaatgttcgtgtcttcctggttggtattgcgctactgattcttcacagactgaagattgtcgagattgtataccaaaaaggagatgtccatgcggatactttggtggaatagatgaacaaggaaatcctatttgtaaatcgtgttgtgttggtgaatattgcgactacctacgtaattatagacttgatccatttcctccatgcaaactatctaaatgtaattaattatgattttgatgataatgttaccatacattatatcgctacttggttagtgtattattcagtatgaagacctattaataattacttatcttttgacgatcttgttataattataatataaaaacttatggcatagtaacttataattgctgacgcgataaattcgtaataatctgttttgttcaaaggaatctacaggcataaaaataaaaatataatttataatatactcttacagcgcgccatcatgaataacagcagtaaattaattgctgttattaatggatttagaaatagtggacgattttgtgatattaatatagttattaatgatgaaaggataaacgctcacagactcatcctatctggagcctccgaatatttttccattctgttttccaataattttatcgattctaatgaatacgaagttaatctaagtcatttagattatcaaagcgtaaacgatttgatcgattacatttatgggatacctttgagcctaactaacgataacgtgaaatatattctttcaaccgctgattttttacaaattggatctgctattacggagtgtgaaaattacatacttaaaaatctttgttctagaaactgtatcgatttctacatatacgctgataaatataataacaagaaaatagaatcagcgtcgtttaacacaatattacaaaatattttgagactcatcaacgatgaaaactttaaatacttaacagaggaatcaatgataaaaattttaagcgatgatatgttaaatataaaaaatgaggatttcgccccactaattctcattaaatggttagagagtactcaacaatcatgcaccgtcgagttacttagatgcctcagaatatcattgctttccccacaagttataaaatcactttatagtcatcaactggttagttcaatctacgaatgtataacattcttaaacaatatagcattcttggatgaatcatttcctagataccatagcatcgagttgatatctatcggtataagtaattcgcatgataagatttccataaactgctacaatcataaaaaaaatacatgggaaatgatatcttcacgtagatataggtgtagtttcgcagtggccgtcctggataatattatctatatgatgggtggatatgatcagtccccgtatagaagttcaaaggttatagcgtacaatacatgtacaaattcttggatatatgatataccagagctaaaatatcctcgttctaattgtgggggactggctgatgacgaatacatttattgtataggcggcatacgcgatcaggattcatcgttgacatctagtattgatagatggaagccatcaaaaccatattggcagaagtatgctaaaatgcgcgaaccaaaatgtgatatgggggttgcgatgttaaacggattaatatatgttataggtggaatcgttaaaggtgacacgtgtaccgacgcactagagagtttatcagaagatggatggatgaagcatcaacgtcttccaataaaaatgtccaatatgtcgacgattgttcatgatggcaagatttatatatctggaggttacaacaatagtagtgtagttaatgtaatatcgaatctagtccttagctataattcgatatatgatgaatggaccaaattatcatcattaaacattcctagaattaatcccgctctatggtcagcgcataataaattatatgtaggaggaggaatatctgatgatgttcgaactaatacatctgagacatacgacaaagaaaaagattgttggacattggataatggtcacgtgttaccacgcaattatataatgtataaatgcgaaccgattaaacataaatatccattggaaaaaacacagtacacgaatgattttctaaagtatttggaaagttttataggtagttgatagaacaaaatacataattttgtaaaaataaatcactttttatactaatatgacacgattaccaatacttttgttactaatatcattagtatactctacaccttctcctcagacatctaaaaaaataggtgatgatgcaactctatcatgtaatcgaaataatacaaatgactacgttgttatgagtgcttggtataaggagcccaattccattattcttttagctgctaaaagcgacgtcttgtattttgataattataccaaggataaaatatcttacgactctccatacgatgatctagttacaactatcacaattaaatcattgactgctagagatgccggtacttatgtatgtgcattctttatgacatcgcctacaaatgacactgataaagtagattatgaagaatactccacagagttgattgtaaatacagatagtgaatcgactatagacataatactatctggatctacacattcaccggaaactagttctgagaaacctgattatatagataattctaattgctcgtcggtattcgaaatcgcgactccggaaccaattactgataatgtagaagatcatacagacaccgtcacatacactagtgatagcattaatacagtaagtgcatcatctggagaatccacaacagacgagactccggaaccaattactgataaagaagatcatacagtcacagacactgtctcatacactacagtaagtacatcatctggaattgtcactactaaatcaaccaccgatgatacgtacaatgataatgatacagtaccaccaactactgtaggcggtagtacaacctctattagcaattataaaaccaaggactttgtagaaatatttggtattaccgcattaattatattgtcggccgtggcaatattctgtattacgtattatatatgtaataaacgttcacgtaaatacaaaacagagaacaaagtctagatttttgacttacataaatgtctgggatagtaaaatctatcatattgagcgggccatctggtttaggaaagacagccatagccaaaagactatgggaatatatttggatttgtggtgtcccataccactagatttcctcgtcctatggaacgagaaggtgtcgattaccattacgttaacagagaggccatctggaagggaatagccgccggaaactttctagaacatactgagtttttaggaaatatttacggaacttctaaaactgctgtgaatacagcggctattaataatcgtatttgtgtgatggatctaaacatcgatggcgttagaagtcttaaaaatacgtacctaatgccttactcggtgtatataagacctacctctcttaaaatggttgagaccaagcttcgttgtagaaacactgaagcggatgatgagattcatcgtcgtgtgatgttggcaaaaactgacatggatgaggcaggtgaagccggtctattcgacactattatcattgaagatgatgtgaatttagcatatagtaagttaattcagatactacaggaccgtattagaatgtattttaacactaattagagacttaagacttaaaacttgataattaataatataactcgtttttatatgtggctatttcaacgtctaatgtattagttaaatattaaaacttaccacgtaaaacttaaaatttaaaatgatatttcattgacagatagatcacacattatgaactttcaaggacttgtgttaactgacaattgcaaaaatcaatgggtcgttggaccattaataggaaaaggtggatttggtagtatttatactactaatgacaataattatgtagtaaaaatagagcccaaagctaacggatcattatttaccgaacaggcattttatactagagtacttaaaccatccgttatcgaagaatggaaaaaatctcacaatataaagcacgtaggtcttatcacgtgcaaggcatttggtctatacaaatccattaatgtggaatatcgattcttggtaattaatagattaggtgcagatctagatgcggtgatcagagccaataataatagactaccaaaaaggtcggtgatgttgatcggaatcgaaatcttaaataccatacaatttatgcacgagcaaggatattctcacggagatattaaagcgagtaatatagtcttggatcaaatagataagaataaattatatctagtggattacggattggtttctaaattcatgtctaacggcgaacatgttccatttataagaaatccaaataaaatggataacggtactctagaatttacacctatagattcgcataaaggatacgttgtatctagacgtggagatctagaaacacttggatattgtatgattagatggttgggaggtatcttgccatggactaagatatctgaaacaaagaattgtgcattagtaagtgccacaaaacagaaatatgttaacaatactgcgactttgttaatgaccagtttgcaatatgaacctagagaattgctgcaatatattaccatggtaaactctttgacatattttgaggaacccaattacgacgagtttcggcacatattaatgcagggtgtatattattaagtgtggtgtttggtcgataaaaattaaaaaataacttaatttattattgatctcgtgtgtacaaccgaaatcatggcgatgttttacgcacacgctctcggtgggtacgacgagaatcttcatgcctttcctggaatatcatcgactgttgccaatgatgtcaggaaatattctgttgtgtcagtttataataacaagtatgacattgtaaaagacaaatatatgtggtgttacagtcaggtgaacaagagatatattggagcactgctgcctatgtttgagtgcaatgaatatctacaaattggaaatccgatccatgatcaagaaggaaatcaaatctctatcatcacatatcgccacaaaaactactatgctctaagcggaatcgggtacgagagtctagacttgtgtttggaaggagtagggattcatcatcacgtacttgaaacaggaaacgctgtatatggaaaagttcaacatgattattctactatcaaagagaaggccaaagaaatgagtgcacttagtccaggacctatcatcgattaccacgtctggataggagattgtatctgtcaagttactgctgtggacgtacatggaaaggaaattatgaaaatgagattcaaaaagggtgcggtgcttccgatcccaaatctggtaaaagttaaacttggggagaatgatacagaaaatctttcttctactatatcggcggcaccatcgaggtaaccacctctctggaagacagcgtgaataatgtactcatgaaacgtttggaaactatacgccatatgtggtctgttgtatatgatcattttgatattgtgaatggtaaagaatgctgttatgtgcatacgcatttgtctaatcaaaatcttataccgagtactgtaaaaacaaatttgtacatgaagactatgggatcatgcattcaaatggattccatggaagctctagagtatcttagcgaactgaaggaatcaggtggatggagtcccagaccagaaatgcaggaatttgaatatccagatggagtggaagacactgaatcaattgagagattggtagaggagttcttcaatagatcagaacttcaggctggtgaatcagtcaaatttggtaattctattaatgttaaacatacatctgtttcagctaagcaactaagaacacgtatacggcagcagcttccttctatactctcatcttttaccaacacaaagggtggatatttgttcattggagttgataataatacacacaaagtatttggattcacggtgggttacgactacctcagactgatagagaatgatatagaaaagcatatcaaaagactttgtgttgtgtatttctgtgagaagaaagaggacatcaagtacgcgtgtcgattcatcaaggtatataaacctggggatgaggctacctcgacatacgtgtgcgctatcaaagtggaaagatgctgttgtgctgtgtttgcagattggccagaatcatggtatatggatactaatggtatcaagaagtattctccagatgaatgggtgtcacatataaaattttaattaatgtaactatagagaacaaataataaggttgtaatatcatatagacaataactaacaattaattagtaactgttatctcttttttaattaaccaactaactatatacctattaatacatcgtaattatagttcttaacatctattaatcattaattcgcttctttaattttttataaactaacattgttaattgaaaagggataacatgttacagaatataaattatatatggatttttttaaaaaggaaatacttgactggagtatatatttatctcttcattatatagcacgcgtgttttccaatttttccacatcccatataatacaggattataatctcgttcgaacatacgagaaagtggataaaacaatagttgattttttatctaggttgccaaatttattccatattttagaatatggggaaaatattctacatatttattctatggatgatgctaatacgaatattataattttttttctagatagagtattaaatattaataagaacgggtcatttatacacaatctcgggttatcatcatccattaatataaaagaatatgtatatcaattagttaataatgatcatccagataataggataagactaatgcttgaaaatggacgtagaacaagacattttttgtcctatatatcagatacagttaatatctatatatgtattttaataaatcatggattttatatagatgccgaagacagttacggttgtacattattacatagatgtatatatcactataagaaatcagaatcagaatcatacaatgaattaattaagatattgttaaataatggatcagatgtagataaaaaagatacgtacggaaacacaccttttatcctattatgtaaacacgatatcaacaacgtggaattgtttgagatatgtttagagaatgctaatatagactctgtagactttaatagatatacacctcttcattatgtctcatgtcgtaataaatatgattttgtaaagttattaatttctaaaggagcaaatgttaatgcgcgtaataaattcggaactactccattttattgtggaattatacacggtatctcgcttataaaactatatttggaatcagacacagagttagaaatagataatgaacatatagttcgtcatttaataatttttgatgctgttgaatctttagattatctattatccagaggagttattgatattaactatcgtactatatacaacgaaacatctatttacgacgctgtcagttataatgcgtataatacgttggtctatctattaaacaaaaatggtgattttgagacgattactactagtggatgtacatgtatttcggaagcagtcgcaaacaacaacaaaataataatggaagtactattgtctaaacgaccatctttgaaaattatgatacagtctatgatagcaattactaaacataaacagcataatgcagatttattgaaaatgtgtataaaatatactgcgtgtatgaccgattatgatactcttatagatgtacagtcgctacagcaatataaatggtatattttaagatgtttcgatgaaatagatatcatgaagagatgttatataaaaaataaaactgtattccaattagttttttgtatcaaagacattaatactttaatgagatacggtaaacatccttctttcgtgaaatgcactagtctcgacgtatacggaagtcgtgtacgtaatatcatagcatctattagatatcgtcagagattaattagtctattatccaagaagctggatcctggagataaatggtcgtgttttcctaacgaaataaaatataaaatattggaaaactttaacgataacgaactatccacatatctaaaaatcttataaacattattaaaatataaaatctaagtaggataaaatcacactacatcattgtttccttttagtgctcgacagtgtatactatttttaacgctcataaataaaaatgaaaacgatttccgttgttacgttgttatgcgtactacctgctgttgtttattcaacatgtactgtacccactatgaataacgctaaattaacgtctaccgaaacatcgtttaatgataaccagaaagttacgtttacatgtgatcagggatatcattctttggatccaaatgctgtctgtgaaacagataaatggaaatacgaaaatccatgcaaaaaaatgtgcacagtttctgattatgtctctgaactatataataaaccgctatacgaagtgaattccaccatgacactaagttgcaacggcgaaacaaaatattttcgttgcgaagaaaaaaatggaaatacttcttggaatgatactgttacgtgtcctaatgcggaatgtcaacctcttcaattagaacacggatcgtgtcaaccagttaaagaaaaatactcatttggggaatatatgactatcaactgtgatgttggatatgaggttattggtgcttcgtacataagttgtacagctaattcttggaatgttattccatcatgtcaacaaaaatgtgatatgccgtctctatctaacggattaatttccggatctacattttctatcggtggcgttatacatcttagttgtaaaagtggttttacactaacggggtctccatcatccacatgtatcgacggtaaatggaatcccatactcccaatatgtgtacgaactaacgaaaaatttgatccagtggatgatggtcccgacgatgagacagatttgagcaaactctcgaaagacgttgtacaatatgaacaagaaatagaatcgttagaagcaacttatcatataatcatagtggcgttgacaattatgggcgtcatatttttaatctccgttatagtattagtttgttcctgtgacaaaaataatgaccaatataagttccataaattgctaccgtaaatataaatccgttaaaataattaataatttaataacaaacaagtatcaaaagattaaagacttatagctagaatcaattgagatgtcttcttcagtggatgttgatatctacgatgccgttagagcatttttactcaggcactattataacaagagatttattgtgtatggaagaagtaacgccatattacataatatatacaggctatttacaagatgcgccgttataccgttcgatgatatagtacgtactatgccaaatgaatcacgtgttaaacaatgggtgatggatacacttaatggtataatgatgaatgaacgcgatgtttctgtaagcgttggcaccggaatactattcatggaaatgtttttcgattacaataaaaatagtatcaacaatcaactaatgtatgatataattaatagcgtatctataattctagctaatgagagatatagaagcgcttttaacgacgatggtatatacatccgtagaaatatgattaacaagttgtacggatacgcatctctaactactattggcacgatcgctggaggtgtttgttattatctgttgatgcatctagttagtttgtataaataattatttcaatatactagttaaaattttaagattttaaatgtataaaaaactaataacgtttttatttgtaataggtgcattagcatcctattcgaataatgagtacactccgtttaataaactgagtgtaaaactctatatagatggagtagataatatagaaaattcatatactgatgataataatgaattggtgttaaattttaaagagtacacaatttctattattacagagtcatgcgacgtcggatttgattccatagatatagatgttataaacgactataaaattattgatatgtataccattgactcgtctactattcaacgcagaggtcacacgtgtagaatatctaccaaattatcatgccattatgataagtacccttatattcacaaatatgatggtgatgagcgacaatattctattactgcagagggaaaatgctataaaggaataaaatatgaaataagtatgatcaacgatgatactctattgagaaaacatactcttaaaattggatctacttatatatttgatcgtcatggacatagtaatacatattattcaaaatatgatttttaaaaatttaaaatatattatcacttcagtgacagtagtcaaataacaaacaacaccatgagatatattataattctcgcagttttgttcattaatagtatacatgctaaaataactagttataagtttgaatccgtcaattttgattccaaaattgaatggactggggatggtctatacaatatatcccttaaaaattatggcatcaagacgtggcaaacaatgtatacaaatgtaccagaaggaacatacgacatatccgcatttccaaagaatgatttcgtatctttctgggttaaatttgaacaaggcgattataaagtggaagagtattgtacgggactatgcgtcgaagtaaaaattggaccaccgactgtaacattgactgaatacgacgaccatatcaatttgtacatcgagcatccgtatgctactagaggtagcaaaaagattcctatttacaaacgcagtgacatgtgtgatatctacttgttgtatacggctaacttcacattcggagattctaaagaaccagtaccatatgatatcgatgactacgattgcacgtctacaggttgcagcatagactttgtcacaacagaaaaagtgtgcgtgacagcacagggagccacagaagggtttctcgaaaaaattactccatggagttcgaaagtatgtctgacacctaaaaagagtgtatatacatgcgcaattagatccaaagaagatgttcccaatttcaaggacaaaatggccagagttatcaagagaaaatttaatacacagtctcaatcttatttaactaaatttctcggtagcacatcaaatgatgttaccacttttcttagcatgcttaacttgactaaatattcataactaatttttattaatgaaataaaactgcatattatacactggttaacgcccttataggctctaaccattttcaagatgaggtccctgattatagtccttctgttcccctccatgtctattagacgatgtgagaagactgaagaggaaacatggggattgaaaatagggttgtgtataattgccaaagatttttatcccgaaagaactgattgcagtgttcatctcccaactgcaagtgaaggattcagggatatacgaaacaccgataaattataaaaaaagcaatgtgtccgctgtttccgttaataatactattttcgtaactggcggattattcataaataactctaatagcacgatcgtggttaacaatatggaaaacttgacatttataaagacaaacaatggtcgattatagaaatgcctatggctagggtatatcacggcatcgactcgacatttggaatgttatattttgccggaggtctatccgttaccgaacaatatggtaatttagagaaaaacaacgagatatcttgttacaatcctagaacgaataagtggtttgatatttcatatactatttataagatatccatatcatcattgtgtaaactaaataacgtcttctatgtatttagtaaggacattggatatgtggaaaagtatgatggtgcatggaagttagtacatgatcgtctccccgctataaaggcattatcaacttctccttattgattgaaaatataaatagtttttatgtatagcagtattaccctatagttttattgcttactactaacatggatacagatacagatacagatacagatacagatacagatacagatgttacaaatgtagaagatatcataaatgaaatagatagagagaaagaagaaatactaaaaaatgtagaaattgaaaataataaaaacattaacaagaatcatcccaatgaatatattagagaagcactcgttattaatacaagtagtaatagtgattccattgataaagaagttatagaatgtatctgtcacgatgtaggaatatagatcatatctactaatttttataatcgatacaaaacataaaaaacaactcgttattacatagcaggcatggaatccttcaagtattgttttgataacgatggcaagaaatggattatcggaaatactttatattctggtaattcaatactctataaggtcagaaaaaatttcactagttcgttctacaattacgtaatgaagatagatcacaaatcacacaagccattgttgtttgaaatacgattctatatatctgtattggatcctttgactatcgacaactggacacgggaacgtggtataaagtatttggctattccagatctgtatggaattggagaaaccgatgattatatgttcttcgttataaagaattcgggaagagtattcgccccaaaggatactgaatcagtcttcgaagcatgcgtcactatgataaacacgttagagtttatacactctcgaggatttacccatggaaaaatagaaccgaggaatatactgattagaaataaacgtctttcactaattgactattctagaactaacaaactatacaagagtggaaactcacatatagattacaacgaggacatgataacttcaggaaatatcaattatatgtgtgtagacaatcatcttggagcaacagtttcaagacgaggagatttagaaatgttgggatattgcatgatagaatggttcggtggcaaacttccatggaaaaacgaaagtagtataaaagtaataaaacaaaaaaaagaatataaaaaatttatagctactttctttgaggactgttttcctgaaggaaatgaacctctggaattagttagatatatagaattagtatacacgttagattattctcaaactcctaattatgacagactacgtaaactgtttatacaagattgaaattatattcttttttttatagagtgtggtagtgttacggatatctaatattaatattagactatctctatcgcgctacacgaccaatatcgattactatggatatcttctatgaaaggagagaatgtattcatttctccagcgtcaatctcgtcagtattgacaatactgtattatggagctaatggatccactgctgaacagctatcgaaatatgtagaaacggaggagaacacggataaggttagcgctcaaaatatctcattcaaatccataaataaagtatatgggcgatattctgccgtgtttaaagattcctttttgagaaaaattggcgataagtttcaaactgttgacttcactgattgtcgcactatagatgcaatcaacaagtgtgtagatatctttactgaggggaaaatcaatccactattggatgaaccattgtctcctagcaattagtgccgtatactttaaagcaaaatggttgacgccattcgaaaaggaatttaccagtgattatcccttttacgtatctccgacggaaatggtagacgtaagtatgatgtctatgtacggcaaggcatttaatcacgcatctgtaaaagaatcattcggcaacttttcaatcatagaactgccatatgttggagatactagtatgatggtcattcttccagacaagattgatggattagaatccatagaacaaaatctaacagatacaaattttaagaaatggtgtgactttatggatgctatgtttatagatgttcacattcccaagtttaaggtaacaggctcgtataatctggtggatactctagtaaagtcaggactgacagaggtgttcggttcaactggagattatagcaatatgtgtaatttagatgtgagtgtcgacgctatgatccacaaaacgtatatagatgtcaatgaagagtatacagaagcagctgcagcaacttctgtactagtggcagactgtgcatcaacaattacaaatgagttctgtgcagatcatccgttcatctatgtgattaggcatgttgatggaaaaattcttttcgttggtagatattgctctccgacaactaattgttaaccattttttttaaaaaaaatagaaaaaacatgtggtattagtgcaggtcgttgttcttccaattgcaattggtaagatgacggccaactttagtacccacgtcttttcaccacagcactgtggatgtgacagactgaccagtattgatgacgtcaaacaatgtttgactgaatatatttattggtcgtcctatgcataccgcaacaggcaatgcgctggacaattgtattccacactcctctcttttagagatgatgcggaattagtgttcatcgacattcgcgagctggtaaaaaatatgccgtgggatgatgtcaaagattgtacagaaatcatccgttgttatataccggatgagcaaaaaaccatcagagagatttcggccatcatcggactttgtgcatatgctgctacttactggggaggtgaagaccatcccactagtaacagtctgaacgcattgtttgtgatgcttgagatgctcaattacgtggattataacatcatattccggcgtatgaattgatgagttgtacatcttgacattttctttcttctcttctccctttcttctcttctccctttcttctcttctcccttcctccctcttctccctttcccagaaacaaacttttttacccactataaaataaaatgagtatactacctattatatttcttcctatatttttttattcttcattcgttcagacttttaacgcgcctgaatgtatcgacaaagggcaatattttgcatcattcatggagttagaaaacgagccagtaatcttaccatgtcctcaaataaatacgctatcatccggatataatatattagatattttatgggaaaaacgaggagcggataataatagaattataccgatagataatggtagcaatatgctaattctgaacccgacacaatcagactctggtatttatatatgcattaccacgaacgaaacctactgtgacatgatgtcgttaaatttgacaatcgtgtctgtctcagaatcaaatatagatcttatctcgtatccacaaatagtaaatgagagatctactggcgaaatggtatgtcccaatattaatgcatttattgctagtaacgtaaacgcagatattatatggagcggacatcgacgccttagaaataagagacttaaacaacggacacctggaattattaccatagaagatgttagaaaaaatgatgctggttattatacatgtgttttagaatatatatacggtggcaaaacatataacgtaaccagaattgtaaaattagaggtacgggataaaataataccttctactatgcaattaccagatggcattgtaacttcaataggtagtaatttgactattgcatgcagagtatcgttgagacctcccacaacggatgcagacgtcttttggataagtaatggtatgtattacgaagaagatgatggggacggagacggtagaataagtgtagcaaataaaatctatatgaccgataagagacgtgttattacatcccggttaaacattaatcctgtcaaggaagaagatgctacaacgtttacgtgtatggcgtttactattcctagcatcagcaaaacagttactgttagtataacgtgaatgtatgttgttacatttccatgtcaattgagtttataagaatttttatacattatcttccaacaaacaattgacgaacgtattgctatgattaactcccacgatactatgcatattattaatcattaacttgcagactatacctagtgctattttgacatactcatgttcttgtgtaattgcagtatctatattattaaagtacgtaaatctagctatagttttattatttaattttagataatataccgtctccttatttttaaaaattgccacatcctttattaaatcatgaatgggaatttctatgtcatcgttagtatattgtgaacaacaagagcagatatctataggaaagggtggaatgcgatacattgatctatgtagttttaaaacacacgcgaactttgaagaatttatataaatcattccatcgatacatccttctatgttgagatgtatatatccaggaattcttttattaatgtcgggaaatgtataaactaaaacattgcccgaaagcggtgcctctatctgcgttatatccgttcttaacttacaaaatgtaaccaatacctttgcatgacttgttttgttcggcaacgttagtttaaacttgacgaatggattaattacaatagcatgatccgcgcatctattaagtttttttactttaacgcccttgtatgtttttacagagactttatctaaatttctagtgcttgtatgtgttataaatataacgggatatagaaccgaatcacctaccttagatacccaattacattttatcagatccagataataaacaaattttgtcgccctaactaattctatattgttatatattttacaattggttatgatatcatgtaataacttggagtctaacgcgcatcgtcgtacgtttatacaattgtgatttagtgtagtatatctacacatgtatttttccgcactatagtattctggactagtgataaaactatcgttatatctgtcttcaatgaactcatcgagatattgctctctgtcatattcatacacctgcataaactttctagacatcttacaatccgtgttattttaggatcatatttacatatttacgggtatatcaaagatgttagattagttaatgggaatcgtctataataatgaatattaaacaattatatgaggacttttaccacaaagcatcataaaaatgagtcgtcgtctgatttatgttttaaatatcaaccgcgaatcaactcataaaatacaagagaatgaaatatatacatattttagtcattgcaatatagaccatacttctacagaacttgattttgtagttaaaaactatgatctaaacagacgacaacctgtaactgggtatactgcactacactgctatttgtataataattactttacaaacgatgtactgaagatattattaaatcatgacgtaaatgtaacgatgaaaaccagtagcggacgtatgcctgtttatatattgcttactagatgttgtaatatttcacatgatgtagtgatagatatgatagacaaagataaaaaccacttattacatagagactattccaacctattactagagtatataaaatctcgttacatgttattaaaggaagaggatatcgatgagaacatagtatccactttattagataagggaatcgatcctaactttaaacaagacggatatacagcgttacattattattatttgtgtctcgcacacgtttataaaccaggtgagtgtagaaaaccgataacgataaaaaaggccaagcgaattatttctttgtttatacaacatggagctaatctaaacgcgttagataattgtggtaatacaccattccatttgtatcttagtattgaaatgtgtaataatattcatatgactaaaatgctgttgacttttaatccgaatttcgaaatatgtaataatcatggattaacgcctatactatgttatataacttccgactacatacaacacgatattcttgttatgttaatacatcactatgaaacaaatgttggagaaatgccgatagatgagcgtcgtatgatcgtattcgagtttatcaaaacatattctacacgtccggcagattcgataacttatttgatgaataggtttaaaaatataaatatttatacccgctatgaaggaaagacattattacacgtagcatgtgaatataataatacacacgtaatagattatcttatacgtatcaacggagatataaatgcgttaaccgacaataacaaacacgctacacaactcattatagataacaaagaaaattccccatataccattaattgtttactgtatatacttagatatattgtagataagaatgtgataagatcgttggtggatcaacttccatctctacctatctttcgtcgcttatcatactagtcatatcctaaatgttgatcatattccaccaaatgattgtgaaagagattgagattaaatcgtctaacaaacaattagtttttatgacattaacatataataaataaattaatcattattgacttaacgatgacgaaagttatcatcatcttaggattcttgattattaatacaaattcattgtctatgaaatgtgaacaaggtgtctcatattataattcacaagaattaaagtgttgtaaactatgtaagccaggaacatattcagatcatcgatgtgataaatacagcgataccatttgtggacattgtccgagtgacacattcacgtcaatatataatcgttctccttggtgtcatagttgtagaggtccatgtggtactaatcgagtagaggtcacaccttgtacacctaccacaaatagaatctgtcattgtgactcgaatagttattgtctccttaaagcttctgatggtaactgtgttacatgtgctcctaaaacaaaatgtggtcgtgggtatggaaagaaaggagaagatgaaatgggtaataccatttgtaagaaatgtcggaagggtacttattcagatattgtatctgactctgatcaatgtaaaccaatgacaagataagacttactcgcatctactggatagacataaaatatcctcctcgtaataatgaaatataaatatacactaattattaatatcaataacaatcgagtattaatatataggtcatttttaaatcccttttgggttccgtcccaaacggcgtttcggtctgcgtcgccgccatggccatgccgagcctctccgcgtgctcctccatcgaggacgacttcaactatggcagctcggtggcgtctgccagcgtgcacatacgaatggcatttctaagaaaagtctacggtatcctttgtctacaatttcttttaacaacggcaacaactgcagtatttttatactttgactgcatgcggacatttatacaagggagtcctgttctaatattggcatcaatgttcggatctataggcttgattttcgcattgactttacacagacataaacatcccctgaatctgtacctgctttgtggatttacactgtcggaatctctaacgctggcctctgttgttactttctatgatgtgcatgtcgttatgcaagctttcatgctgactactgcagcgtttcttgctctgactacatatactctacaatcaaagagagatttcagtaaacttggagcaggattgtttgctgctttgtggattttaattttgtcaggactcttggggatatttgtgcaaaatgagacagtggagctggtcctgtctgcttttggggcccttgtattctgtggattcattatctatgacacgcactcactaatacataagctctcgcctgaagagtatgtgttagcctctatcaatctctacttggatatcatcaatctgttcttgcatctgttgcagcttttggaagtatctaataagaaataaagtttaaaatagaattaataaaaacatataggtcattttttaaacatggattggaaaccaaggtagttagttaatacacacaagatatatttttttcacatcatccacccatgggtaacaccaaggttgttagttaataatatacaagatattttttctcactctgatccatgtaaaccaaggacgagataagacactctcattcctcatccacaacccattaaaaaaatggaaattaaagccctctattagcataaacggctacaggtctacctttacaatggcctctccttgtgcccagttcagaccctgtcattgccacgctactaaggactccctgaataccgtggccgacgtcagacattgtctgactgaatacatcctgtgggtttctcatagatggacccatagagaaagcgcagggtctctctacaggcttctcatctctttcagaactgatgcaacggagctctttggtggtgagttgaaggattcacttccgtgggacaattgcgtggagatcattaaatgtttcatcagaaatgactccatgaaaaccgccgaagaacttcgtgcaatcattggactttgtactcaatcagctatcgtctctggaagagtcttcaacgataagtatatcgacatactacttatgctgcgaaagattctgaacgagaacgactatctcaccctcttggatcatatccgcactgctaaatactaaatctccttcatgctctctcactacactttttatcatcttatgaggaatgattgccttcgtgaaataggaataattagcaccagaatagctatggattattgtggtagagagtgcactattctatgtcgtctactggatgaagatgtgacgtacaaaaaaataaaactagaaattgaaacgtgtcacaacttatcaaaacatatagatagacgaggaaacaatgcgctacattgttacgtctccaataaatgcgatacagacattaagattgttctctcgcggagtcgagagactttgtagaaacaacgaaggattaactccgctaggagtatacagtaagcatagatacgtcaaatctcaaattgtgcatctactgatatccagctattcgaattcctctaacgaactcaagtcgaatataaatgatttcgatctgtattcggataatatcgacttacgtctgctaaaatacctaattgtggataaacggatacgtccgtccaagaatacgaattatgcaatcaatggtctcggattggtggatatatacgtaacgacgcctaatccgagaccagaagtattgctatggcttcttaaatcagaatgttacagcaccggttacgtatttcgtacctgtatgtacgacagtgatatgtgtaagaactctcttcattactatatatcgtctcatagagaatctcaatctctatccaaggatgtaattaaatgtttgatcgataacaatgtttccatccatggcagagacgaaggaggatctttacccatccaatactactggtctttctcaaccatagatatagagattgttaaattattattaataaaggatgtggacacgtgtagagtatacgacgtcagccctatattagaggcgtattatctaaacaagcgatttagagtaaccccatataatgtagacatggaaatcgttaatcttcttattgagagacgtcatactcttgtcgacgtaatgcgtagtattacttcgtacgattccagagaatataaccactacatcatcgataacattctaaagagatttagacaacaggatgtacaagccatactgataaactacttacattacggcgatatggtcgttcgatgcatgttggataacggagcaaccatggataagacgacggacaacaactatcctctacacgactactttgttaataataatctcgtcgatgtaaacgtcgtaaggtttatcgtggaaaatatggacacgcggctgtaaatcacgtatcgaacaatggccgtctatgtatgtacggtctgatattatcgagatttaataattgcgggtatcactgttatgaaaccatactgatagatgtatttgatatactaagcaagtacatggatgatatagatatgatcgataactctactatattacgcggtcgatgtcaataatatacaatttgcaaagcggttattggaatatggagcgagtgtcacgctcgataatcaatacggccatccagaaaagcagttaccaaagagaaaacaaaacgaagctagttgatttattactgagttaccatcccactctagagactatgattgacgcatttaatagagatatacgctatctatatcctgaaccattattcgcctgtatcagatacgccttaatcctagatgatgattttccttctaaagtaaagtatgatatcgccggtcgtcataaggaactaaagcgctatagagtagacattaatagaatgaagaatgtctacatatcaggcgtttccatgtttgatatattatttaaacgaagcaaacgccacagattgagatacgcaaagaatccgacatcaaatggtacaaaaaagaactaacgtccatcattacagaaactgtaaagaacaatgagaggatcgactccatagtggacaacattaatacagacgataacttgatttcgaaattacccatggagatactttattactccattaaataatttatcatggagcgataatgtcctgtttcatttgtttccatgacatattacaaaatcgattccgtccaagatgataaaaacatttaccggcatcataaacacggagtttattttatatgtctcgcataaacattactaaaaaaatatattgttcggtttttctttcacatctttaattatgaaaaagtaaatcattatgagatggacgagattgtacgcatcgttcgcgacagtatgtggtacatacctaacgtatttatggacgacggtaagaatgaaggtcacgtttctgtcaacaatgtctgtcatatgtattttacgttctttgatgtagatacatcgtctcatctgtttaagctagttattaaacactgcgatctgaataaacgaggtaactctccattacattgctatacgatgaatacacgatttaatccatctgtattaaagatattgttacaccacggcatgcgtaactttgatagcaaggatgaccactatcaatcgataacaagatctttgatatactaacggacaccattgatgactttagtaaatcatccgatctattgctgtgttatcttagatataaattcaatgggagcttaaactattacgttctgtacaaaggatccgaccctaattgcgccgacgaggatgaactcacttctcttcattactactgtaaacacatatccacgttctacgaaagcaattattacaagtcaagtcacactaagatgcgagccgagaagcgattcatctacgcgataatagattatggagcaaacattaacgcggttacacacttaccttcaacagtataccaaacatagtcctcgtgtggtgtatgctcttttatctcgaggagccgatacgaggatacgtaataatcttgattgtacacccatcatggaacgattgtgcaacaggtcatattctcataatgttactcaattggcacgaacaaaaggaagaaggacaacatctactttatctattcataaaacataatcaaggatacactctcaatatactacggtatctattagataggttcgacattcagaaagacgaatactataataccgcctttcaaaattgtaacaacaatgttgcctcatacatcggatacgacatcaaccttccgactaaagacggtattcgacttggtgtttgaaaacagaaacatcatatacaaggcggatgttgtgaatgacatcatccaccacagactgaaagtatctctacctatgattaaatcgttgttctacaagatgtctctccctacgacgattactacgtaaaaaagatactagcctactgcctattaagggacgagtcattcgcggaactacatagtaaattctgtttaaacgaggactataaaagtgtatttatgaaaaatatatcattcgataagatagattccatcatcgtgacataagtcgcctcaaagagattcgaatctccgacaccgacctgtatacggtatcacagctatcttaaagccatacattcagacagtcacatttcatttcccatgtacgacgatctcatagaacagtgccatctatcgatggagcgtaaaagtaaactcgtcgacaaagcactcaataaattagagtctaccatcggtcaatctagactatcgtatttgcctccggaaattatgcgcaatatcatctaaacagtatgttgtacggaaagaaccattacaaatattatccatgatagaaagaaaatatctatatgattggagaagtaggaaacaggaacaagacaacgattactacattattaaatcatgaagtccgtattatactcgtatatattgtttctctcatgtataataataaacggaagagatatagcaccgcatgcaccatccgatggaaagtgtaaagacaacgaatacaaacgccataatttgtgtccgggaacatacgcttccagattatgcgatagcaagactaacacacaatgtacgccgtgtggttcgggtaccttcacatctcgcaataatcatttacccgcttgtctaagttgtaacggaagacgcgatcgtgtaacacgactcacaatagaatctgtgaatgctctcccggatattattgtcttctcaaaggatcatccggatgcaaggcatgtgtttcccaaacaaaatgtggaataggatacggagtatccggagacgtcatctgttctccgtgtggtctcggaacatattctcacaccgtctcttccgcagataaatgcgaacccgtacccagaaatacgtttaactatatcgatgtggaaattaacctgtatccagttaacgacacgtcgtgtactcggacgaccactaccggtctcagcgaatccatctcaacgtcggaactaactattactatgaatcataaagactgtaatcccgtctttcgtgatggatacttctccgttcttaataaggtagcgacttcaggtttctttacaggagaaaggtgtgcactctgaatttcgagattaaatgcaataacaaagattcttcctccaaacagttaacgaaagcaaagaatgatactatcatgccgcattcggagacagtaactctagtgggcgacatctatatactatatagtaataccaatactcaagactacgaaactgatacaatctcttatcatgtgggtaatgttctcgatgtcgatagccatatgcccggtagttgcgatatacataaactgatcactaattccaaacccacccactttttatagtaagtttttcacccataaataataaatacaataattaatttctcgtaaaagtagaaaatatattctaatttattgcacggtaaggaagtagaatcataaagaacagtactcaatcaatagcaattatgaaacaatatatcgtcctggcatgcatgtgcctggcggcagctgctatgcctgccagtcttcagcaatcatcctcatcctcctcctcgtgtacggaagaagaaaacaaacatcatatgggaatcgatgttattatcaaagtcacaaagcaagaccaaacaccgaccaatgataagatttgccaatccgtaacggaaattacagagtccgagtcagatccagatcccgaggtggaatcagaagatgattccacatcagtcgaggatgtagatcctcctaccacttattactccatcatcggtggaggtctgagaatgaactttggattcaccaaatgtcctcagattaaatccatctcagaatccgctgatggaaacacagtgaatgctagattgtccagcgtgtccccaggacaaggtaaggactctcccgcgatcactcatgaagaagctcttgctatgatcaaagactgtgaagtgtctatcgacatcagatgtagcgaagaagagaaagacagcgacatcaagacccatccagtactcgggtctaacatctctcataagaaagtgagttacgaagatatcatcggttcaacgatcgtcgatacaaaatgcgtcaagaatctagagtttagcgttcgtatcggagacatgtgcaaggaatcatctgaacttgaggtcaaggatggattcaagtatgtcgacggatcggcatctgaaggtgcaaccgatgatacttcactcatcgattcaacaaaactcaaagcgtgtgtctgaatcgataactctattcatctgaaattggatgagtagggttaatcgaacgattcaggcacaccacgaattaaaaaagtgtaccggacactatattccggtttgcaaaacaaaaatgttcttaactacattcacaaaaagttacctctcgcgacttcttctttttctgtctcaatagtgtgatacgattatgacactattcctattcctattcctatttcctttcagagtatcacaaaaatattaaacctctttctgatggtctcataaaaaaagttttacaaaaatatttttattctctttctctctttgatggtctcataaaaaaagttttacaaaaatatttttattctctttctctctttgatggtctcataaaaaaagttttacaaaaatatttttattctctttctctctttgatggtctcataaaaaaagttttacaaaaatatttttattctctttctctctttgatggtctcataaaaaaagttttacaaaaatatttttattctctttctctctttgatggtctcataaaaaaagttttacaaaaatatttttattctctttctctctttgatggtctcataaaaaaagttttacaaaaatatttttattctctttctctctttgatggtctcataaaaaaagttttacaaaaatatttttattctctttctctctttgatggtctcataaaaaaagttttacaaaaatatttttattctctttctctctttgatggtctcataaaaaaagttttacaaaaatatttttattctctttctctctttgatggtctcataaaaaaagttttacaaaaatatttttattctctttctctctttgatggtctcataaaaaaagttttacaaaaatatttttattctctttctctctttga

SEQ ID NO: 10 - DNA, 188082 bp, Vaccinia virus
  LIVP 7.1.1
atttttgtaaaactttttttatgagaccatcaaagagagaaagagaataaaaatatttttgtaaaactttttttatgagaccatcaaagagagaaagagaataaaaatatttttgtaaaactttttttatgagaccatcaaagagagaaagagaataaaaatatttttgtaaaactttttttatgagaccatcaaagagagaaagagaataaaaatatttttgtaaaactttttttatgagaccatcaaagagagaaagagaataaaaatatttttgtaaaactttttttatgagaccatcaaagagagaaagagaataaaaatatttttgtaaaactttttttatgagaccatcaaagagagaaagagaataaaaatatttttgtaaaactttttttatgagaccatcaaagagagaaagagaataaaaatatttttgtaaaactttttttatgagaccatcaaagagagaaagagaataaaaatatttttgtaaaactttttttatgagaccatcaaagagagaaagagaataaaaatatttttgtaaaactttttttatgagaccatcaaagagagaaagagaataaaaatatttttgtaaaactttttttatgagaccatcaaagagagaaagagaataaaaatatttttgtaaaactttttttatgagaccatcaaagagagaaagagaataaaaatatttttgtaaaactttttttatgagaccatcagaaagaggtttaatatttttgtgataccctgaaaggaaataggaataggaataggaataggaatagtgtcataatcgtatcacactattgagacagaaaaagaagaagtcgcgagaggtaactttttgtgaatgtagttaagaacatttttgttttgcaaaccggaatatagtgtccggtacacttttttaattcgtggtgtgcctgaatcgttcgattaaccctactcatccaatttcagatgaatagagttatcgattcagacacacgctttgagttttgttgaatcgatgagtgaagtatcatcggttgcaccttcagatgccgatccgtcgacatacttgaatccatccttgacctcaagttcagatgattccttgcacatgtctccgatacgaacgctaaactctagattcttgacacattttgtatcgacgatcgttgaaccgatgatatcttcgtaactcactttcttatgagagatgttagacccgagtactggatgggtcttgatgtcgctgtctttctcttcttcgctacatctgatgtcgatagacacctcacagtctttgatcatagcaagagcttcttcacgagtgatcgcgggagagtccttaccttgtcctggggacacgctggacaatctagcattcactgtgtttccatcagcggattctgagatggatttaatctgaggacatttggtgaatccaaagttcattctcagacctccaccgatgatggagtaataagtggtaggaggatctacatcctcgactgatgtggaatcatcttctgattccacctcgggatctggatctgactcggactctgtaatttccgttacggattggcaaatcttatcattggtcggtgtttggtcttgctttgtgactttgataataacatcgattcccatatgatgtttgttttcttcttccgtacacgaggaggaggatgaggatgattgctgaagactggcaggcatagcagctgccgccaggcacatgcatgccaggacgatatattgtttcataattgctattgattgagtactgttctttatgattctacttccttaccgcgcaataaattagaatatattttctacttttacgagaaattaattattgtatttattatttatgggtgaaaaacttactataaaaagtgggtgggtttggaattagtgatcagtttatgtatatcgcaactaccgggcatatggctatcgacatcgagaacattacccacatgataagagattgtatcagtttcgtagtcttgagtattggtattactatatagtatatagatgtcgcccactagagttactgtctccgaatgcggcatgatagtatcattctttgctttcgttaactgtttggaggaagaatctttgttattgcatttaatctcgaaattcagagtgcacacctttctcctgtaaagaatcctgaagttgctaccttattaagaacggagaagtatccatcacgaaatacgggattacagtctttatgattcatagtaatagttagttccgacgttgagatggattcgctgagaccggtagtggtcgtccgagtacacgacgtgtcgttgacgggatacagattaatttccacatcgatatagttaaacgtattactgggtacgggttcgcatttatctgcggaagagacggtgtgagaatatgttccgagaccacacggagaacagatgacgtctccggatactccgtatcctattccacattttgtttgggaaacacatgccttgcatccggatgatcctttgagaagacaataatatccgggagagcattcacagattctattgtgagtcgtgttacacgatcgcgtcttccgttacaacttagacaagcgggtaaatgattattgcgagatgtgaaggtacccgaaccacacggcgtacatcgtgtgttagtcttgctatcgcataatctggaagcgtatgttcccggacacaaattatggcgtttgtattcgttgtctttacactttccatcggatggtgcatgcggtgctatatctcttccgtttattattatacatgagagaaacaatatatacgagtataatacggacttcatgatttaataatgtagtaatcgttgtcttgttcctgtttcctacttctccaatcatatagatattttctttctatcatggataatatttgtaatggttctttccgtacaacatactgtttagatgatattgcgcataatttccggaggcaaatacgatagtctagattgaccgatggtagactctaatttattgagtgctttgtcgacgagtttacttttacgctccatcgatagatggcactgttctatgagatcgtcgtacatgggaaatgaaatgtgactgtctgaatgtatggctttaagatagctgtgataccgtatacaggtcggtgtcggagattcgaatctctttgaggcgacttatgtcacgatgatggaatctatcttatcgaatgatatatttttcataaatacacttttatagtcctcgtttaaacagaatttactatgtagttccgcgaatgactcgtcccttaataggcagtaggctagtatcttttttacgtagtaatcgtcgtagggagagacatcttgtagaacaacgatttaatcataggtagagatactttcagtctgtggtggatgatgtcattcacaacatccgccttgtatatgatgtttctgttttcaaacaccaagtcgaataccgtctttagtcggaaggttgatgtcgtatccgatgtatgaggcaacattgttgttacaattttgaaaggcggtattatagtattcgtctttctgaatgtcgaacctatctaatagataccgtagtatattgagagtgtatccttgattatgttttatgaatagataaagtagatgttgtccttcttccttttgttcgtgccaattgagtaacattatgagaatatgacctgttgcacaatcgttccatgatgggtgtacaatcaagattattacgtatcctcgtatcggctcctcgagataaaagagcatacaccacacgaggactatgtttggtatactgttgaaggtaagtgtgtaaccgcgttaatgtttgctccataatctattatcgcgtagatgaatcgcttctcggctcgcatcttagtgtgacttaacttgtaataattgctttcgtagaacgtggatatgtgtttacagtagtaatgaagagaagtgagttcatcctcgtcggcgcaattagggtcggatcctttgtacagaacgtaatagtttaagctcccattgaatttatatctaagataacacagcaatagatcggatgatttactaaagtcatcaatggtgtccgttagtatatcaaagatcttgttatcgattgatagtggtcatccttgctatcaaagttacgcatgccgtggtgtaacaatatctttaatacagatggattaaatcgtgtattcatcgtatagcaatgtaatggagagttacctcgtttattcagatcgcagtgtttaataactagcttaaacagatgagacgatgtatccacatcaaagaacgtaaaatacatatgacagacattgttgacagaaacgtgaccttcattcttaccgtcgtccataaatacgttaggtatgtaccacatactgtcgcgaacgatgcgtacaatctcgtccatctcataatgatttactttttcataattaaagatgtgaaagaaaaccgaacaatatatttttttagtaatgtttatgcgagacatataaaataaactccgtgtttatgatgccggtaaatgtttttatcatcttggacggaatcgattttgtaatatgtcatggaaacaaatgaaacaggacattatcgctccatgataaattatttaatggagtaataaagtatctccatgggtaatttcgaaatcaagttatcgtctgtattaatgttgtccactatggagtcgatcctctcattgttctttacagtttctgtaatgatggacgttagttcttttttgtaccatttgatgtcggattctttgcgtatctcaatttgtggcgtttgcttcgtttaaataatatatcaaacatggagacgcctgatatgtagacattcttcattctattaatgtctactctatagcgctttagttccttatgacgaccggcgatatcatactttactttagaaggaaaatcatcatctaggattaaggcgtatctgatacaggcgaataatggttcaggatatagatagcgtatatctctattaaatgcgtcaatcatagtctctagagtgggatggtaactcagtaataaatcaactagcttcgttttgttttctctttggtaactgcttttctggatggccgtattgattatcgagcgtgacactcgctccatattccaataaccgctttgcaaattgtatattattgacatcgaccgcgtaatatagtagagttatcgatcatatctatatcatccatgtacttgcttagtatatcaaatacatctatcagtatggtttcataacagtgatacccgcaattattaaatctcgataatatcagaccgtacatacatagacggccattgttcgatacgtgatttacagccgcgtgtccatattttccacgataaaccttacgacgtttacatcgacgagattattattaacaaagtagtcgtgcagaggatagttgttgtccgttatctaacatgcatcgaacgaccatatcgccgtaatgtaagtagtttatcaacatggcttgtacatcctgttgtctaaatctctttagaatgttatcgatgatgtagtggttatattctctggaatcgtacgaagtaatactacgcattacgtcgacaagagtatgacgtctctcaataagaagattaacgatttccatgtctacattatatggggttactctaaatcgcttgtttagataatacgcctctaatatagggctgacgtcgtatactctacacgtgtccacatcctttattaataataatttaacaatctctatatctatggttgagaaagaccagtagtattggatgggtaaagatcctccttcgtctctgccatggatggaaacattgttatcgatcaaacatttaattacatccttggatagagattgagattctctatgagacgatatatagtaatgaagagagttcttacacatatcactgtcgtacatacaggtacgaaatacgtaaccggtgctgtaacattctgatttaagaagccatagcaatacttctggtctctcgttacgtatatatccaccaatccgagaccattgattgcataattcgtattcttggacggacgtatccgtttatccacaattaggtattttagcagacgtaagtcgatattatccgaatacagatcgaaatcatttatattcgacttgagttcgttagaggaatttgaatagctggatatcagtagatgcacaatctgagattttacgtatctatgcttactgtatactcctagcggagttaatccttcgttgtttctacaaagtctctcgactccgcgagagaacaatcttaatgtctgtatcgcatttattggagacgtaacaatgtagcgcattgtttcctcgtctatctatatgttttgataagttgtgacacgtttcaatttctagttttatttttttgtacgtcacatcttcatccagtagacgacatagaatagtgcactctctaccacaataatccatagctattctggtgctaattattcctatttcacgaaggcaatcattcctcataagatgataaaaagtgtagtggagatttagtatttagcagtgcggatatgatccaagagggtgagatagtcgttctcgttcagaatctttcgcagcataagtagtatgtcgatatacttatcgttgaagactctttataaaagtctatttgtttatatttattgcggatagcagtatttccctataaaaagtatacgtcctgtggtgtctttaatcatgtacatgaatggatggtttatgtagaccttcgtacgatataccatcgaaaagttaatcgtaaatactcctgtaacggccgatgcttctgtatactcctcattaacatctataaacgtcgtatgtagaaatttttctacagtgatagtttcattacacatcttgctaaaatctgcataatatccgaatatattagtaagtcctaaattttctaaaatcggtaccagattatacggttctgtcatttccactttaaactttggcatatacaagtctatacttttagtagataacataccacaccattttttaaatttttcatctgttatatttttttctatgttatatataccttctatgtcgtccggtagtataatcaccatactagagtttccctcgtatggaatatcgataatagagaatcctccgaataattcattaatatgtacatattgcaagttattctcggtacccaccatcatatcaacgctggtaactatattcttagaaatataaaacttgtctgtatatgtaagatgtttagaaaatggatatttccacattgctttaaaatggacggcgctaacaactgtcatacgagtattaatggatagcggactagtcaataaggaattaattttaccatttgtcattgtcttaacccattcgttgattagttcctttgtttggttagcattattaaagtttacagtttgaaaatcgtcttttattttttgtaggaaggaggcgtggaactcgatactatcgctaccgtatattttatttgcggtagctagtgtcgcacaatacggaatatctacctccatgtcatcattattgtcatcgggtgtattctcattcatattctctatatattttgatagttgttcagctgtagaaccagctgctccatgatttagaatagataaagtagataaaatggaaactggagaaatcaaaacattttcatcagggtgttttaagattagttctttaaagatatccatggtatagacctaacgataacgatatatatcataaataaataatgttaaatttcaatttatgtttgtaccccgtattcatacttaacaaattggtattgcgtacacaatcaatcatattacataccattaataatgcaagcataaaaaattgttagtagatgtttctaaatataggttccgtaagcaaagaatataagaatgaagcggtaatgataaaatcaatcgttatctaaaatgatcatactcatttattttattctattatattaacacatacatttttaacagcaacacattcaatattgtattgttatttttatattatttacacaattaacaatatattattagtttatattactgaattaataatataaaattcccaatcttgtcataaacacacactgagaaacagcataaacacagaatccatcaaaaatgttgataaattatctgatgttgttgttcgctgctatgataatcagatcattcgccgatagtggtaacgctatcgaaacgacattgccagaaattacaaacgctacaacagatattccagctatcagattatgcggtccagagggagatggatattgtttacacggtgactgtatccacgctagagatattgacggtatgtattgtagatgctctcatggttatacaggcattagatgtcagcatgtagtattagtagactatcaacgttcagaaaacccaaacactacaacgtcatatatcccatctcccggtattatgcttgtattagtaggcattattatgtgttgtctattatctgtttataggttcactcgacgaactaaactacctatacaagatatggttgtgccataatttttataaatttttttatgagtatttttacaaaaatgtataaagtgtatgtcttatgtatatttataaaaatgctaagtatgcgatgtatctatgttatttgtatttatctaaacaatacctctacctctagatattatacaaaaattttttatttcggcatattaaagtaaaatctagttaccttgaaaatgaatacagtgggtggttccgtatcaccagtaagaacataatagtcaaatacagtatccgattgagattttgcatacaatactagtctagaaagaaatttgtaatcatcttctgtgacgggagtccatatatctgtatcatcgtctagtttatcagtgtcccatgctatattcctgttatcatcattagttaatgaaaataactctcgtgcttcagaaaagtcaaatattgtatccatacatacatctccaaaactatcgcttatacgtttatctttaacgatacctatacctagatggttatttactaacagacattttccagatctattgactataactcctatagtttccacatcaaccaagtaatgatcatctattgttatataacaataacataactcttttccatttttatcagtatgtatatctatatcaacgtcgtcgttgtagtgaatagtagtcattgatctattatatgaaacggatatgtctagaacggcaattgttttacgtccagttaacactttcgttgatttaaagtctagagtctttgcaaacataatatccttatccgactttatatttcctgtagggtggtataattttattttgcctccacatatcggtgtttccaaatatattactagacaatattccatatagttattagttaagggtacccaattagaacacgtacgcttattatcatcatttggatcgtatttcataaaagttattgtgttatcgatgtcaacacattctacattttttaatcgtctatatagtatttttctgatattttctataatatcagaattgtcttccatcggaagttgtatactatcggaatcagttacatgtttaaataattctctgatgtcattccttatacaatcaaattcattattaaacagtttaatagtctgtagacctttatcgtcgtaaatatccattgtcttattagttacgcttatttttatgtgtttttacgttgctttattatattttataagaatgattgtttgacgaatcacgagaactattaagacacattattaggtatatattataaaaaagtttttgattacgatgttataagaggaaagaggacacattaacatcatacatcaattaactacattcttataacatcgtaatcaaaagaattgcaattttgatgtataacaactgtcaatgggttatggaattgtatattacatattatacggtatgttggtaacgacaaataccggtcggtaattgtctgccggtgtaatagaattatatatatctatctattacaccggccttgtatacataataataagttgtggtagtatgatctccatatttataatttaggactttgtattcagtatttttggaatcataaaaaataaaaaaaagttttactaatttaaaatttaaaaagtatttacatttttttcactgtttagtcgcggatatggaattcgatcctgccaaaatcaatacatcatctatagatcatgtaacaatattacaatacatagatgaaccaaatgatataagactaacagtatgcattatccgaaatattatatcaatatcacaaaaataaatacacatttggctaatcaatttcgggcttggaaaaaacgtatcgccggaagggactatatgactaacttatctagagatacaggaatacaacaatcaaaacttactgaaactatacgtaactgtcaaaaaaatagaaacatatatggtctatatatacactacaatttagttattaattggataaccgatgtgattatcaatcaatattaagagggttggtaaattggtacatagctaataatacctatacacccaataatacaacaaccatttctgagttggatatcatcaaaatactggataaatacgaggacgtgtatagagtaagtaaagaaaaagaatgtggaatttgctatgaagttgtttactcaaaacgatagatactttggtttattggattcgtgtactcatatattttgcataacatgcatcaatatatggcatagaacacgaagagaaaccggtgcgtcggataattgtcctatatgccgtacccgttttagaaacataacaatgagcaagttctataagctagttaactaataaataaaaagtttaatttgttgacgacgtatgtcgttatttttctcgtatgaaagattaaattcaattcaattcgttgtttctaatataatctgccgtattggatggattctcaagacaattgcatttagattatattatcatgaataaaaatagtagcacacaactacttcagcaaatattcttttttgaaacgccatctatcgtagtgaggacacaagtgaacctataatgagcaaatttattagtatcagtcacatgaaggactttctgtagagtgacgattccactatctgtggtacgaacggtttcatcttctttgatgccatcacccagatgttctataaacttggtatcctcgtccgatttcatatcctttgccaaccaatacatatagctaaactcaggcatatgttccacacatcctgaacaatgaaattctccagaagatgttacaatgtctagatttggacatttggtttcaaccgcgttaacatatgagtgaacacacccatacatgaaagcgatgagaaataggattctcatcttgccaaaatatcactagaaaaaatttatttatcagttttaaaggtataaaaaatacttattgttgctcgaatattttgtatttgatggtatacggaagattagaaatgtaggtattatcatcaactgattctatggttttatgtattctatcatgtttcactattgcgttggaaataatatcatatgcttccacatatattttattttgttttaactcataatactcacgtaattctggattattggcatatctatgaataattttagctccatgatcagtaaatattaatgagaacatagtattaccacctaccattatttttttcatctcattcaattcttaattgcaaagatctatataatcattatagcgttgacttatggactctggaatcttagacgatgtacagtcatctataatcatggcatatttaatacattgttttatagcatagtcgttatctacgatgttagatatttctctcaatgaatcaatcacataatctaatgtaggtttatgacataatagcattttcagcagttcaatgtttttagattcgttgatggcaatggctatacatgtatatccgttatttgatctaatgttgacatctgaaccggattctagcagtaaagatactagagattgtttattatatttaacagccttgtgaagaagtgtttctcctcgtttgtcaatcatgttaatgtctttaagataaggtaggcaaatgtttatagtactaagaattgggcaagcataagacatgtcacaaagaccctttttgtatgtataagtgtagaaattataacatccatagttggatttacataggtgtccaatcgggatctctccatcatcgagataattgatggcatctcccttccttttttagtagatatttcatcgtgtaagaatcaatattaatatttctaaagtatccgtgtatagcctctttatttaccacagttccatattccactagagggatatcgccgaatgtcatatactcaattagtatatgttggaggacatccgagttcattgttttcaatatcaaagagatggtttccttatcatttctccatagtggtacaatactacacattatttcgtgcggctttccattttccaaaaacaatttgaccaaatctacatctttattgtatctataatcactatttagataatcagccataattactcgagtgcaacatgttagatcgtctatatatgaataagccgtgttatctattcctttcattaacaatttaacgatgtctatatctatatgagatgacttaatataatattgaagagctgtacaatagtttttatctataaaagacggcttgattccgtgattaattagacatttaacaacttccggacgcacatatgctctcgtatccgactctgaatacagatgagagatgatatacagatgcaatacggtaccgcaatttcgtagttgataatcatcatacgcgtatcagtactcgtcctcataaagaacactgcagccattttctatgaacaaatcaataattttaggaacaggatcattgtcattacataattttctataactgaacgatggttttcacatttaacactcaagtcaaatccatgttctaccaacacctttatcaagtcaacgtctacatttttggatttcatatagctgaatatattaaagtcatttatgttgctaaatccagtggcttctagtagagccatcgctatatcctttaactttaacatgtctactatttgtgtattcttctaatggggtagctgtctccaatttttgcgtaatggattagtgccactgtctagtagtagtttgacgacctcgacattattacaatgctcattaaaaaggtatgcgtgtaaagcattattcttgaattggttcctggtatcattaggatctctgtctttcaacatctgtttaagttcatcaagagccacctcctcattttccaaatagtcaaacattttgactgaatgagctactgtgaactctatacacccacacaactaatgtcattaaatatcatgtcaaaaacttgtacaattattaataaaaataatttagtgtttaaattttaccagttccagattttacacctccgttaatacctccattaaccccactggacgatcctcctccccacattccaccgccaccagatgtataagttttagatcctttattactaccatcatgtccatggataaagacactccacatgccgccactaccccctttagaagacatattaataagacttaaggacaagtttaacaataaaattaatcacgagtaccctactaccaacctacactattatatgattatagtttctatttttacagtaccttgactaaagtttctagtcacaagagcaatactaccaacctacactattatatgattatagtttctatttttataggaacgcgtacgagaaaatcaaatgtctaatttctaacggtagtgttgataaacgattgttatccgcggatacctcctctatcatgtcgtctattttcttactttgttctattaacttattagcattatatattatttgattataaaacttatattgcttattagcccaatctgtaaatatcggattattaacatatcgtttctttgtaggtttatttaacatgtacatcactgtaagcatgtccttaccatttattttaatttgacgcatatccgcaatttctttttcgcagtcggttataaattctatatatgatggatacatgctacatgtgtacttataatcgactaatatgaagtacttgatacatattttcagtaacgatttattattaccacctatgaataagtacctgtgatcgtctaggtaatcaactgttttcttaatacattcgatggttggtaatttactcagaataatttccaatatcttaatatataattctgctatttctgggatatatttatctgccagtataacacaaatagtaatacatgtaaacccatattttgttattatattaatgtctgcgccattatctattaaccattctactaggctgacactatgcgactcaatacaatgataaagtatactacatccatgtttatctattttgtttatatcatcaatatacggcttacaaagttttagtatcgataacacatccaactcacgcatagagaaggtagggaataatggcataatatttattaggttatcatcattgtcattatctacaactaagtttccattttttaaaatatactcgacaactttaggatctctattgccaaatttttgaaaatatttatttatatgcttaaatctatataatgtagctccttcatcaatcatacatttaataacattgatgtatactgtatgataagatacatattctaacaatagatcttgtatagaatctgtatatcttttaagaattgtggatattaggatattattacataaactattacacaattctaaaatataaaacgtatcacggtcgaataatagttgatcaactatataattatcgattttgtgatttttcttcctaaactgtttacgtaaatagttagatagaatattcattagttcatgaccactatagttactatcgaataacgcgtcaaatatttcccgtttaatatcgcatttgtcaagataataatagagtgtggtatgttcacgataagtataataacgcatctctttttcgtgtgaaattaaatagtttattacgtccaaagatgtagcataaccatcttgtgacctagtaataatataataatagagaactgttttacccattctatcatcataatcagtggtgtagtcgtaatcgtaatcgtctaattcatcatcccaattataatattcaccagcacgtctaatctgttctattttgatcttgtatccatactgtatgttgctacatgtaggtattcctttatccaataatagtttaaacacatctacattgggatttgatgttgtagcgtatttttctacaatattaataccatttttgatactatttatttctatacctttcgaaattagtaatttcaataagtctatattgatgttatcagaacatagatattcgaatatatcaaaatcattgatatttttatagtcgactgacgacaataacaaaatcacaacatcgtttttgatattattatttttcttggtaacgtatgcctttaatggagtttcaccatcatactcatataatggatttgcaccactttctatcaatgattgtgcactgctggcatcgatgttaaatgttttacaactatcatagagtatcttatcgttaaccatgattggttgttgatgctatcgcattttttggtttctttcatttcagttatgtatggatttagcacgtttgggaagcatgagctcatatgatttcagtactgtagtgtcagtactattagtttcaataagatcaatctctagatctatagaatcaaaacacgataggtcagaagataatgaatatctgtaggcttcttgttgtactgtaacttctggttttgttagatggttgcatcgtgctttaacgtcaatggtacaaattttatcctcgctttgtgtatcatattcgtccctactataaaattgtatattcagattatcatgcgatgtgtatacgctaacggtatcaataaacggagcacaccatttagtcataaccgtaatccaaaaatttttaaagtatatcttaacgaaagaagttgtgtcattgtctacggtgtatggtactagatcctcataagtgtatatatctagagtaatgtttaatttattaaatggttgataatatggatcctcgtgacaatttccgaagatggaaataagacataaacacgcaataaatctaattgcggacatggttactccttaaaaaaatacgaataatcaccttggctatttagtaagtgtcatttaacactatactcatattaatccatggactcataatctctatacgggattaacggatgttctatatacggggatgagtagttctcttctttaactttatactttttactaatcatatttagactgatgtatgggtaatagtgtttgaagagctcgttctcatcatcagaataaatcaatatctctgtttttttgttatacagatgtattacagcctcatatattacgtaatagaacgtgtcatctaccttattaactttcaccgcatagttgtttgcaaatacggttaatcctttgacctcgtcgatttccgaccaatctgggcgtataatgaatctaaactttaattgcttgtaatcattcgaaataatttttagtttgcatccgtagttatcccctttatgtaactgtaaatttctcaacgcgatatctccattaataatgatgtcgaattcgtgctgtatacccatactgaatggatgaacgaataccgacggcgttaatagtaatttactttttcatctttacatattgggtactagttttactatcataagtttataaattccacaagctactatggaataagccaaccatcttagtataccacacatgtcttaaagtttattaattaattacatgttgttttatatatatcgctacgaatttaaagagaaattagtttaggaagaaaaattatctatctacatcatcacgtctctgtattctacgatagagtgctactttaagatgcgacagatccgtgtcatcaaatatatactccattaaaatgattattccggcagcgaacttgatattggatatatcacaacctttgttaatatctacgacaatagacagcagtcccatggttccataaacagtgagtttatctttctttgaagagatattttgtagagatcttataaaactgtcgaatgacatcgcatttatatctttagctaaatcgtatatgttaccatcgtaatatctaaccgcgtctatcttaaacgtttccatcgctttaaagacgtttccgatagatggtctcatttcatcagtcatactgagccaacaaatataatcgtgtataacatctttgatagaatcagactctaaagaaaacgaatcggctttattatacgcattcatgataaacttaatgaaaaatgtttttcgttgtttaagttggatgaatagtatgtcttaataattgttattatttcattaattaatatttagtaacgagtacactctataaaaacgagaatgacataactaatcataactagttatcaaagtgtctaggacgcgtaattttcatatggtatagatcctgtaagcattgtctgtattctggagctattttctctatcgcattagtgagttcagaatatgttataaatttaaatcgaataacgaacataactttagtaaagtcgtctatattaactcttttattttctagccatcgtaataccatgtttaagatagtatattctctagttactacgatctcatcgttgtctagaatatcacatactgaatctacatccaattttagaaattggtctgtgttacatatctcttctatattattgttgatgtattgtcgtagaaaactattacgtagaccattttctttataaaacgaatatatagtactccaattatctttaccgatatatttgcacacataatccattctctcaatcactacatctttaagattttcgttgttaagatatttggctaaactatataattctattagatcatcaacagaatcagtatatatttttctagatccaaagacgaactctttggcgtcctctataatattcccagaaaagatattttcgtgttttagtttatcgagatctgatctgttcatatacgccatgattgtacggtacgttatgataaccgcataaaataaaaatccattttcatttttaaccaatactattcataattgagattgatgtaatactttgttactttgaacgtaaagacagtacacggatccgtatctccaacaagcacgtagtaatcaaatttggtgttgttaaacttcgcaatattcatcaatttagatagaaacttatactcatcatctgttttaggaatccatgtattattaccactttccaacttatcattatcccaggctatgtttcgtccatcatcgttgcgcagagtgaataattcttttgtattcggtagttcaaatatatgatccatgcatagatcggcaaagctattgtagatgtgatttttcctaaatctaatataaaactcgtttactagcaaacactttcctgatttatcgaccaagacacatatggtttctaaatctatcaagtggtggggatccatagttatgacgcagtaacatatattattacattcttgactgtcgctaatatctaaatatttattgttatcgtattggattctgcatatagatggcttgtatgtcaaagatatagaacacataaccaatttatagtcgcgctttacattctcgaatctaaagttaagagatttagaaaacattatatcctcggatgatgttatcactgtttctggagtaggatatattaaagtctttacagatttcgtccgattcaaataaatcactaaataatatcccacattatcatctgttagagtagtatcattaaatctattatattttatgaaagatatatcactgctcacctctatatttcgtacatttttaaactgtttgtataatatctctctgatacaatcagatatatctattgtgtcggtagacgataccgttacatttgaattaatggtgttccattttacaacttttaacaagttgaccaattcatttctaatagtatcaaactctccatgattaaatattttaatagtatccattttatatcactacggacacaaagtagctgacataaaccattgtataatttttatgttttatgtttattagcgtacacattttggaagttccggcttccatgtatttcctggagagcaagtagatgatgaggaaccagatagtttatatccgtacttgcacttaaagtctacattgtcgttgtatgagtatgatcttttaaacccgctagacaagtatccgtttgatattgtaggatgtggacatttaacaatctgacacgtgggtggatcggaccattctcctcctgaacacaggacactagagttaccaatcaacgaatatccactattgcaactataagttacaacgctcccatcggtataaaaatcctcgtatccgttatgtcttccgttggatatagatggaggggattggcatttaacagattcacaaataggtgcctcgggattccataccatagatccagtagatcctaattcacaatacgatttagattcaccgatcaactgatatccgctattacaagagtacgttatactagagccaaagtctactccaccaatatcaagttggccattatcgatatctcgaggcgatgggcatctccgtttaatacattgattaaagagtgtccatccagtacctgtacatttagcatatataggtcccattttttgctttctgtatccaggtagacatagatattctatagtgtctcctatgttgtaattagcattagcatcagtctccacactattcttaaatttcatattaatgggtcgtgacggaatagtacagcatgatagaacgcatcctattcccaacaatgtcaggaacgtcacgctctccaccttcatatttatttatccgtaaaaatgttatcctggacatcgtacaaataataaaaagcccatatatgttcgctattgtagaaattgtttttcacagttgctcaaaaacgatggcagtgacttatgagttacgttacactttggagtctcatctttagtaaacatatcataatattcgatattacgagttgacatatcgaacaaattccaagtatttgattttggataatattcgtattttgcatctgctataattaagatataatcaccgcaagaacacacgaacatctttcctacatggttaaagtacatgtacaattctatccatttgtcttccttaactatatatttgtatagataattacgagtctcgtgagtaattccagtaattacatagatgtcgccgtcgtactctacagcataaactatactatgatgtctaggcatgggagacttttttatccaacgatttttagtgaaacattccacatcgtttaatactacatatttctcatacgtggtataaactccacccattacatatatatcatcgtttacgaataccgacgcgcctgaatatctaggagtaattaagtttggaagtcttatccatttcgaagtgccgtgtttcaaatattctgccacacccgttgaaatagaaaattctaatcctcctattacatataactttccatcgttaacacaagtactaacttctgattttaacgacgacatattagtaaccgttttccattttttcgttttaagatctacccgcgatacggaataaacatgtctattgttaatcatgccgccaataatgtatagacaattatgtaaaacatttgcattatagaattgtctatctgtattaccgactatcgtccaatattctgttctaggagagtaatgggttattgtggatatataatcagagtttttaatgactactatattatgttttataccatttcgtgtcactggctttgtagatttggatatagttaatcccaacaatgatatagcattgcgcatagtattagtcataaacttgggatgtaaaatgttgatgatatctacatcgtttggatttttatgtatccactttaataatatcatagctgtaacatcctcatgatttacgttaacgtcttcgtgggataagatagttgtcagttcatcctttgataattttccaaattctggatcggatgtcaccgcagtaatattgttgattatttctgacatcgacgcattatatagttttttaattccatatcttttagaaaagttaaacatccttatacaatttgtgaaattaatattatgaatcatagtttttacacatagatctactacaggcggaacatcaattattatggcagcaactagtatcatttctacattgtttatggtgatgtttatcttcttccagcgcatatagtctaatagcgattcaaacgcgtgatagtttataccattcaatataatcgcttcatcctttagatggtgatcctgaatgcgtttaaaaaaattatacggagacgccgtaataatttccttattcacttgtataatttccccattgatagaaaatattacgctttccattcttaaagtactataagtaattatagtataatgtaaacgtttatatattcaatatttttataaaaatcattttgacattaattcctttttaaatttccgtctatcatctatagaaacgtattctatgaatttataaaatgcttttacgtgtcctatcgtaggcgatagaaccgctaaaaagcctatcgaatttctacaaaagaatctgttatatggtatagggagagtataaaacattaaatgtccgtacttattaaagtattcagtagccaatcctaactctttcgaatacttattaatggctcttgttctgtacgaatctatttttttgaacaacggacctagtggtatatcttgttctatgtatctaaaataatgtctgactagatccgttagtttaatatccgcagtcatcttgtctagaatggcaaatctaactgcgggtttaggctttagtttagtttctatatctacatctatgtctttatctaacaccaaaaatataatagctaatattttattacaatcatccggatattcttctacgatctcactaactaatgtttctttggttatactagtatagtcactatcggacaaataaagaaaatcagatgatcgatgaataatacatttaaattcatcatctgtaagatttttgagatgtctcattagaatattattagggttagtactcattatcattcggcagctattacttattttattatttttcaccatatagatcaatcattagatcatcaaaatatgtttcaatcatcctaaagagtatggtaaatgactcttcccatctaatttctgaacgttcaccaatgtctctagccactttggcactaatagcgatcattcgcttagcgtcttctatattattaactggttgattcaatctatctagcaatggaccgtcggacagcgtcattctcatgttcttaatcaatgtacatacatcgccgtcatctaccaattcatccaacaacataagctttttaaaatcatcattataataggtttgatcgttgtcatttctccaaagaatatatctaataagtagagtcctcatgcttagttaacaactattttttatgttaaatcaattagtacaccgctatgtttaatacttattcatattttagtttttaggattgagaatcaatacaaaaattaatgcatcattaattttagaaatacttagtttccacgtagtcaatgaaacatttgaactcatcgtacaggacgttctcgtacaggacgtaactataaaccggtttatatttgttcaagatagatacaaatccgataactttttttacgaattctacgggatccactttaaaagtgtcataccgggttctttttatttttttaaacagatcaatggtgtgatgttgattaggtcttttacgaatttgatatagaatagcgtttacatatcctccataatggtcaatcgccatttgttcgtatgtcataaattctttaattatatgacactgtgtattatttagttcatccttgttcattgttaggaatctatccaaaatggcaattatactagaactataggtgcgttgtatacacatattgatgtgtctgtttatacaatcaatgctactaccttcgggtaaaattgtagcatcatataccatttctagtactttaggttcattattatccattgcagaggacgtcatgatcgaatcataaaaaaatatattatttttatgttattttgttaaaaataatcatcgaatacttcgtaagatactccttcatgaacataatcagttacaaaacgtttatatgaagtaaagtatctacgatttttacaaaagtccggatgcataagtacaaagtacgcgataaacggaataataatagatttatctagtctatctttttctatagctttcatagttagatacatggtctcagaagtaggattatgtaacatcagcttcgataaaatgactgggttatttagtcttacacattcgctcatacatgtatgaccgttaactacagagtctacactaaaatgattgaacaatagatagtctaccattgtttcgtattcagatagtacagcgtagtacatggcatcttcacaaattatatcattgtctaatagatatttgacgcatcttatggatcccacttcaacagccatcttaaaatcggtagaatcatattgctttcctttatcattaataatttctagaacatcatctctatcataaaagatacaaatattaactgtttgatccgtaataacattgctagtcgatagcaatttgttaataagatgcgctgggctcaatgtcttaataagaagtgtaagaggactatctccgaatttgttttgtttattaacatccgttgatggaagtaaaagatctataatgtctacattcttgactgttttagagcatacaatatggagaggtgtatttccatcatgatctggttttgagggactaattcctagtttcatcatccatgagattgtagaagcttttggattgtctgacataagatgtctatgaatatgatttttgccaaatttatccactatcctggcttcgaatccgatggacattatttttttaaacactctttctgaaggatctgtacacgccaacaacggaccacatccttcttcatcaaccgagttgttaatcttggctccatactgtaccaataaatttattctctctatgacttcatcatctgttcccgagagataatatagaggcgttttatgctgtttatcacacgcgtttggatctgcgccgtgcgtcagcagcatcgcgactattctattattattaattttagaagctatatgcaatggataatttccatcatcatccgtctcatttggagagtatcctctatgaagaagttcttcgacaaatcgttcatctagtcctttaattccacaatacgcatgtagaatgtgataattatttccagaaggttcgatagcttgtagcatattcctaaatacatctaaatttttactattatatttggcataaagagatagataatactcggccgacataatgttgtccattgtagtataaaaattaatatttctatttctgtatatttgcaacaatttactctctataacaaatatcataacttagttcttttatgtcaagaaggcactggtttagttcatctataaatgtcacgccataactaccacgcatgccatactcagaattatgataaagatatttatccttggggtgtaggtaatggggattaatctttgttggatcagtctctaagttaacacatgtcacacatgatccatttatagttatatcacacgatgatgatttatgaattgattccggaagatcgctatcgtattttgtggttccacaattcatttccatacatgttattgtcacactaatattatgatgaactttatctagccgctgagtggtaaacaacagaacagatagtttattatctttaccaacaccctcagccgctgccacaaatctctgatccgtatccatgatggtcatgtttatttctagtccgtatccagtcaacactatgttagcatttctgtcgatatagctttcactcatatgacactcaccaataatagtagaattaatgtcgtaatttacaccaatagtgagttcggcggcaaagtaccaataccggtaatcttgtcgaggaggacatatagtattcttgtattctaccgaatacccgagagatgcgatacaaaagagcaagactaatttgtaaaccatcttactcaaaatatgtaacaatagtacgatgcaatgagtaagacaataggaaatctatcttatatacacataattattctatcaattttaccaattagttagtgtaatgttaacaaaaatgtgggagaatctaattagtttttctttacacaattgacgtacatgagtctgagttccttgtttttgctaattatttcatccaatttattattcttgacgatatcgagatcttttgtataggagtcaaacttgtattcaacatgcttttctataatcattttagctatttcggcatcatccaatagtacattttccagattagcagaatagatattaatgtcgtatttgaacagagcctgtaacatctcaatgtctttattatctatagccaatttaatgtccggaatgaagagaagggaattattggtgtttgtcgacgtcatatagtcgagcaagagaatcatcatatccacgtgtccattttttatagtgatgtgaatacaactaaggagaatagccagatcaaaagtagatggtatctctgaaagaaagtaggaaacaatacttacatcattaagcatgacggcatgataaaatgaagttttccatccagttttcccatagaacatcagtctccaatttttcttaacaaacagttttaccgtttgcatgttaccactatcaaccgcataatacaatgcggtgtttcccttgtcatcaaattgtgaatcatccagtccactgaatagcaaaatctttactattttggtatcttccaatgtggctgcctgatgtaatggaaattcattctctagaagatttttcaatgctccagcgttcaacaacgtacatactagacgcacgttattatcagctattgcataatacaaggcactatgtccatggacatccgccttaaatgtatctttactagagagaaagcttttcagctgcttagacttccaagtattaattcgtgacagatccatgtctgaaacaagacgctaattagtgtatattttttcattttttataattttgtcatattgcaccagaattaataatatctctaatagatctgattagtagatacatggctatcgcaaaacaacatatacacatttaataaaaataatatttattaagaaaattcagatttcacgtacccatcaatataaataaaataatgattccttacaccgtacccatattaaggagattccaccttacccataaacaatataaatccagtaatatcatgtctgatgatgaacacaaatggtgtattaaattccagtttttcaggagatgatctcgccgtagctaccataatagtagatgcctctgctacagttccttgttcgtcgacatctatctttgcattctgaaacattttataaatatataatgggtccctagtcatatgtttaaacgacgcattatctggattaaacatactaggagccatcatttcggctatcgacttaatatccctcttattttcgatagaaaatttagggagtttaagattgtacactttatttcctaattgagacgaccaatagtctaattttgcagccgtgatagaatctgtgaaatgggtcatattatcacctattgccaggtacatactaatattagcatccttatacggaaggcgtaccatgtcatattctttgtcatcgattgtgattgtatttccttgcaatttagtaactacgttcatcatgggaaccgttttcgtaccgtacttattagtaaaactagcattgcgtgttttagtgatatcaaacggatattgccatatacctttaaaatatatagtattaatgattgcccatagagtattattgtcgagcatattagaatctactacattagacataccggatctacgttctactatagaattaattttattaaccgcatctcgtctaaagtttaatctatataggccgaatctatgatattgttgataatacgacggtttaatgcacacagtattatctacgaaactttgataagttagatcagtgtacgtatatttagatgttttcagcttagctaatcctgatattaattctgtaaatgctggacccagatctctttttctcaaatccatagtcttcaataattctattctagtattacctgatgcaggcaatagcgacataaacatagaaaacgaataaccaaacggtgagaagacaatattatcatcttgaatatttttatacgctactataccggcattggtaaatccttgtagacgataggcggacgctgaacacgctaacgatagtatcaataacgcaatcatgattttatggtattaataattaaccttatttttatgttcggtataaaaaaattattgatgtctacacatccttttgtaattgacatctatatatccttttgtataatcaactctaatcactttaacttttacagttttccctaccagtttatccctatattcaacatatctatccatatgcatcttaacactctctgccaagatagcttcagagtgaggatagtcaaaaagataaatatatagagcataatcattctcgtatactctgccctttattacatcacccgcattgggcaacgaataacaaaatgcaagcatcttgttaacgggctcgtaaattgggataaaaattatgtttttattgtcttatatctattttattcaagagaatattcaggaatttctttttccggttgtatctcgtcgcagtatatatcatttgtacattgtttcatattttttaatagtttacaccttttagtaggactagtatcgtacaattcatagctgtattttgaattccaatcacgcataaaaatatcttccaattgttgacgaagacctaatccatcatccggtgtaatattaatagatgctccacatgtatccgtaaagtaatttcctgtccaatttgaggtacctatataggccgttttatcggttaccatatatttggcatggtttaccctagaatacggaatgggaggatcagcatctggtacaataaatagctttacttctatatttatgtttttagattttagcatagcgatagatcttaaaaagtttctcatgataaacgaagatcgttgccagcaactaatcaatagcttaacggatacttgtctgtctatagcggatcttcttaattcatcttctatataaggccaaaacaaaattttacccgccttcgaataaataatagggataaagttcataacagatacataaacgaatttactcgcatttctaatacatgacaataaagcggttaaatcattggttctttccatagtacatagttgttgcggtgcagaagcaataaatacagagtgtggaacgccgcttacgttaatactaagaggatgatctgtattataatacgacggataaaagtttttccaattatatggtagattgttaactccaagataccagtatacctcaaaaatttgagtgagatccgctgccaagttcctattattgaagatcgcaatacccaattccttgacctgagttagtgatctccaatccatgttagcgcttcctaaataaatatgtgtattatcagatatccaaaattttgtatgaagaactcctcctaggatatttgtaatatctatgtatcgtacttcaactccggccatttgtagtctttcaacatcctttaatggtttgttagatttattgacggctactctaactcgtactcctcttttgggtaattgtacaatctcgtttaatattatcgtgccgaaattcgtacccacttcatccgataaactccaataaaaagatgatatatctagtgtttttgtggtattggatagaatttccctccacatgttaaatgtagacaaatatactttatcaaattgcatacctataggaatagtttctgtaatcactgcgattgtattatccggattcattttatttgttaaaagaataatcctatatcacttcactctattaaaaatccaagtttctatttctttcatgactgattttttaacttcatccgtttccttatgaagatgatgtttggcaccttcataaatttttatttctctattacaatttgcatgttgcatgaaataatatgcacctaaaacatcgctaatcttattgtttgttccctggagtatgagagtcgggggggtgttaatcttggaaattatttttctaaccttgttggtagccttcaagacctgactagcaaatccagccttaattttttcatgattgactaatgggtcgtattggtatttataaactttatccatatctctagatactgattctggacatagctttccgactggcgcatttggtgtgatggttcccataagtttggcagctagcagattcagtcttgaaacagcatctgcattaactagaggagacattagaatcattgctgtaaacaagtttggattatcgtaagaggctagctcccatggaatgacccaataagtagatttaatagttaccacgtgctgtaccaaagtcatcaatcatcattttttcaccattacttcttccatgtccaatatgatcatgtgagaatactaaaattcctaacgatgatatgttttcagctagttcgtcataacgtccagaatgtttaccagctccatgacttatgaatactaatgccttaggatatgtaataggtttccaatatatgtaatcattgtccagattgaacatacagtttgcactcatgattcacgttatataactatcaatattaacagttcgtttgatgatcatattatttttatgttttattgataattgtaaaaacatacaattaaatcaatatagaggaaggagacggctactgtcttttgtgagatagtcatggcgactaaattagattatgaggatgctgttttttactttgtggatgatgataaaatatgtagtcgcgactccatcatcgatctaatagatgaatatattacgtggagaaatcatgttatagtgtttaacaaagatattaccagttgtggaagactgtacaaggaattgatgaagttcgatgatgtcgctatacggtactatggtattgataaaattaatgagattgtcgaagctatgagcgaaggagaccactacatcaattttacaaaagtccatgatcaggaaagtttattcgctaccataggaatatgtgctaaaatcactgaacattggggatacaaaaagatttcagaatctagattccaatcattgggaaacattacagatctgatgaccgacgataatataaacatcttgatactttttctagaaaaaaaattgaattgatgatataggggtcttcataacgcataattattacgttagcattctatatccgtgttaaaaaaaattatcctatcatgtatttgagagttttatatgtagcaaacatgatagctgtgatgccaataagctttagatattcacgcgtgctagtgttagggatggtattatctggtggtgaaatgtccgttatataatctacaaaacaatcatcgcatatagtatgcgatagtagagtaaacatttttatagtttttactggattcatacatcgtctacccaattcggttataaatgaaattgtcgccaatcttacacccaaccccttgttatccattagcatagtattaacttcgttatttatgtcataaactgtaaatgattttgtagatgccatatcatacatgatattcatgtccctattataatcattactaactttatcacaatatatgttgataatatctatatatgatctagtctttgtgggcaactgtctatacaagtcgtctaaacgttgtttactcatatagtatcgaacagccatcattacatggtcccgttccgttgatagataatcgagtatgttagtggacttgtcaaatctatataccatattttctggaagtggatatacatagtcgtgatcaacattattgctagcctcatcttctatatcctgtactataccattatctatatcatctacataatctatgatattattacacataaacatcgacaacatactattgtttattatctaagtcctgttgatccaaacccttgatctcctctatttgtactatctagagattgtacttcttccagttctggataatatatacgttgatagattagctgagctattctatctccagtatttacattaaacgtacattttccattattaataagaatgactcctatgtttcccctataatcttcgtctattacaccgcctcctatatcaatgccttttagtgacagaccagacctaggagctattctaccatagcaaatcttaggcatggacatactaatatctgtcttaattaactgtctttctcctggagggatagtataatcgtaagcgctatacaaatcatatccggcagcacccggcgattgcctagtaggagatttagctctgttagtttccttaacaaatctaactggtgagttaatattcatgttgaacataaaactaatattttatttcaaaattatttaccatcccatatattccatgaataagtgtgatgattgtacacttctatagtatctatatacgattcacgataaaatcctcctatcaatagcagtttattatccactatgatcaattctggattatccctcggataaataggatcatctatcagagtccatgtattgctggattcacaataaaattccgcatttctaccaaccaagaataaccttctaccgaacactaacgcgcatgatttataatgaggataataagtggatggtccaaactgccactgatcatgattgggtagcaaatattctgtagttgtatcagtttcagaatgtcctcccattacgtatataacattgtttatagatgccactgctggattacatctaggtttcagaagactcggcatattaacccaagcagcatccccgtggaaccaacgctcaacagatgtgggatttggtagacctcctactacgtataatttattgttagcgggtatcccgctagcatacagtctggggctattcatcggaggaattggaatccaattgtttgatatataatttaccgctatagcattgttatgtatttcattgttcatccatccaccgatgagatatactacttctccaacatgagtacttgtacacatatggaatatatctataatttgatccatgttcataggatactctatgaatggatacttgtatgatttgcgtggttgtttatcacaatgaaatattttggtacagtctagtatccattttacattatttatacctctgggagaaagataatttgacctgattacatttttgataaggagtagcagatttcctaatttatttcttcgctttatataccacttaatgacaaaatcaactacataatcctcatctggaacatttagttcatcgctttctagaataagttttatagatagataatcaaaattgtctatgatgtcatcttctagttccaaaaagtgtttggcaataaagtttttagtatgacataagagattggatagtccgtattctatacccatcatgtaacactcgacacaatattcctttctaaaatctcgtaagataaagtttatacaagtgtagatgataaattctacagaggttaatatagaagcacgtaataaattgacgacgttatgactatctatatatacctttccagtatatgagtaaataactatagaagttagactgtgaatgtcaaggtctagacaaacccttgtaactggatctttatttttcgtgtatttttgacgtaaatgtgtgcgaaagtaaggagataactttttcaatatcgtagaattgactattatattgccacctatagcatcaataattgttttgaatttcttagtcatagacaatgctaatatattcttacagtacacagtattgacaaatatcggcatttatgtttctttaaaagtcaacatctagagaaaaatgattatctttttgagacataactcccattttttggtattcacccacacgtttttcgaaaaaattagtttttccttccaatgatatattttccatgaaatcaaacggattggtaacattataaatttttttaaatcccaattcagaaatcaatctatccgcgacgaattctatatatgttttcatcatttcacaattcattcctataagtttaactggaagagccgcagtaagaaattcttgttcaatggataccgcatctgttataatagatctaacggtttcttcactcggtggatacaataaatgtttaaacatcaaacatgcgaaatcgcagtgcagaccctcgtctctactaattagttcgttggaaaacgtgagtccgggcattaggccacgctttttaagccaaaatatggaagcgaatgatccggaaaagaagattccttctactgcagcaaaggcaataagtctctctccataaccggcgctgtcatgtatccacttttgagcccaatcggccttcttttttacacaaggcatcgtttctatggcattaaagagatagtttttttcattactatctttaacataagtatcgatcaaaagactatacatttccgaatgaatgttttcaatggccatctgaaatccgtagaaacatctagcctcggtaatctgtacttctgtacaaaatcgttccgccaaattttcattcactattccgtcactggctgcaaaaaacgccaatacatgttttataaaatatttttcgtctggtgttagtttattccaatcattgatatctttagatatatctacttcttccactgtccaaaatgatgcctctgcctttttatacatgttccagatgtcatgatattggattgggaaaataacaaatctatttggatttggtgcaaggatgggttccataactaaattaacaataacaataaattttttttcagttatctatatgcctgtacttggattttttgtacatcgatatcgccgcaatcactacaataattacaagtattattgatagcattgttattagtactatcataattaaattatctacattcatgggtgctgaataatcgttattatcatcattatcattttgtaattgtgacatcatactagataaatcgtttgcgagattgttgtgggaagcgggcatggaggatgcattatcattattatttaacgccttccatttggattcacaaatgttacgcacattcaacattttatggaaactataattttgtgaaaacaaataacaagaaaactcgtcatcgttcaaatttttaacgatagtaaaccgattaaacgtcgagctaatttctaacgctagcgactctgttggatatgggtttccagatatatatcttttcagttcccctacgtatctataatcatctgtaggaaatggaagatatttccatttatctactgttcctaatatcatatgtggtggtgtagtagaaccattaagcgcgaaagatgttatttcgcatcgtattttaacttcgcaataatttctggttagataacgcactctaccagtcaagtcaatgatattagcctttacagatatattcatagtagtcgtaacgatgactccatcttttagatgcgatactcctttgtatgtaccagaatcttcgtacctcaaactcgatatatttaaacaagttaatgagatattaacgcgttttatgaatgatgatatataaccagaagttttatcctcggtggctagcgctataaccttatcattataataccaactagtgtgattaatatgtgacacgtcagtgtgggtacaaatatgtacattatcgtctacgtcgtattcgatacatccgcatacagccaacaaatataaaatgacaaatactctaacgccgttcgtacccatcttgatgcggtttaataaatgttttgatttcaatttattgtaaaaaaagattcggttttatactgttcgatattctcattgcttatattttcatctatcatctccacacagtcaaatccgtggttagcatgcacctcatcaaccggtaaaagactatcggactcttctatcattataactctagaatatttaatttggtcattattaatcaagtcaattatcttatttttaacaaacgtgagtattttactcattttttataaaaacttttagaaatatacagactctatcgtgtgtctatatcttctttttatatccaatgtatttatgtctgatttttcttcatttatcatatataatggtccaaattctacacgtgcttcggattcatccagatcattaaggttcttataattgtaacatccttctcttccctcttctacatcttccttcttattcttattcttagcgtcacagaatctaccacagcaggatcccatgacgagcgtcatattaaactaatccattttcaattataatatatgattagtaatgaccattaaaataaaaaatattcttcataaccggcaagaaagtgaaaagttcacattgaaactatgtcagtagtatacatcatgaaatgatgatatatatatactctattttggtggaggattatatgatataattcgtggataatcatttttaagacacatttctttattcgtaaatcttttcacgttaaatgagtgtccatattttgcaatttcttcatatgatggcggtgtacgtggacgaggctgctcctgttcttgttgtggtcgccgactgtcgtgtctgcgtttagatccctccattatcgcgattgcgtagatggagtactattttataccttgtaattaaatttttttattaattaaacgtataaaaacgttccgtatctgtatttaagagccagatttcgtctaatagaacaaatagctacagtaaaaataactagaataattgctacacccactagaaaccacggatcgtaatacggcaatcggttttcgataataggtggaacgtatattttatttaaggacttaacaattgtctgtaaaccacaatttgcttccgcggatcctgtattaactatctgtaaaagcatatgttgaccgggcggagccgaacattctccgatatctaatttctgtatatctataatattattaacctccgcatacgcattacagttcttttctagcttggataccgcactaggtacatcgtctagatctattcctatttcctcagcgatagctcttctatccttttccggaagcaatgaaatcacttcaataaatgattcaaccatgagtgtgaaactaagtcgagaattactcatgcatttgttagttattcggagcgcgcaatttttaaactgtcctataacctctcctatatgaatagcacaagtgacattagtagggatagaatgttgagctaatttttgtaaataactatctataaaaagattatacaaagttttaaactctttagtttccgccatttatccagtctgagaaaatgtctctcataataaatttttccaagaaactaattgggtgaagaatggaaacctttaatctatatttatcacagtctgttttggtacacatgatgaattcttccaatgccgtactaaattcgatatctttttcgatttctggatatgtttttaataaagtatgaacaaagaaatggaaatcgtaataccagttatgtttaactttgaaattgttttttattttcttgttaatgattccagccacttgggaaaagtcaaagtcgtttaatgccgatttaatacgttcattaaaaacaaactttttatcctttagatgaattattattggttcattggaatcaaaaagtaagatattatcgggtttaagatctgcgtgtaaaaagttgtcgcaacagggtagttcgtagattttaatgtataacagagccatctgtaaaaagataaactttatgtattgtaccaaagatttaaatcctaatttgatagctaactcggtatctactttatctgccgaatacagtgctaggggaaaaattataatgtttcctctttcatattcgtagttagttctcttttcatgttcgaaaaagtgaaacatgcggttaaaatagtttataacattaatattactgttaataactgccggataaaagtgggatagtaatttcacgaatttgatactgtcctttctctcgttaaacgcctttaaaaaaactttagaagaatatctcaatgagagttcctgaccatccatagtttgtatcaataatagcaacatatgaagaacccgtttatacagagtatgtaaaaatgttaatttatagtttaatcccatggcccacgcacacacgattaattttttttcatctccctttagattgttgtatagaaatttgggtactgtgaactccgccgtagtttccatgggactatataattttgtggcctcgaatacaaattttactacatagttatctatcttaaagactataccatatcctcctgtagatatgtgataaaaatcgtcgtttataggataaaatcgtttatccttttgttggaaaaaggatgaattaatgtaatcattctcttctatctttagtagtgtttccttattaaaattcttaaaataatttaacaatctaactgacggagcccaattttggtgtaaatctaattgggacattatattgttaaaatacaaacagtctcctaatataacagtatctgataatctatggggagacatccattgatattcaggggatgaatcattggcaacacccatttattgtacaaaaagccccaatttacaaacgaaagtccaggtttgatagagacaaactattaactattttgtctctgtttttaacacctccacagtttttaatttctttagtaatgaaattattcacaatatcagtatcttctttatctaccagagattttactaacttgataaccttggctgtctcattcaatagggtagtaatatttgtatgtgtgatattgatatctttttgaattgtttcttttagaagtgattctttgatggtgccagcatacgaattacaataatgcagaaactcggttaacatgcaggaattatagtaagccaattccaattgttgcctgtgttgtattagagtgtcaatatgagcaatggtgtccttgcgtttctctgatagaatgcgagcagcgattttggcgttatcatttgacgatatttctggaatgacgaatcctgtttctactaactttttggtaggacaaagtgaaacaatcaagaagatagcttctcctcctatttgtggaagaaattgaactcctctagatgatctactgacgatagtatctccttgacagatattggaccgaattacagaagtacctggaatgtaaagccctgaaaccccctcattttttaagcagattgttgccgtaaatcctgcactatgcccaagatagagagctcctttggtgaatccatctctatgtttcagtttaaccaagaaacagtcagctggtctaaaatttccatctctatctaatacagcatctaacttgatgtcaggaactatgaccggtttaatgttatatgtaacattgagtaaatccttaagttcataatcatcactgtcatcagttatgtacgatccaaacaatgtttctaccggcatagtggatacgaagatgctatccatcagaatgtttccctgattagtattttctatatagctattcttctttaaacgattttccaaatcagtaactatgttcatttttttaggagtaggacgcctagccagtatggaagaggattttctagatcctctcttcaacatctttgatctcgatggaatgcaaaaccccatagtgaaacaaccaacgataaaaataatattgtttttcactttttataattttaccatctgactcatggattcattaatatctttataagagctactaacgtataattctttataactgaactgagatatatacaccggatctatggtttccataattgagtaaatgaatgctcggcaataactaatggcaaatgtatagaacaacgaaattatactagagttgttaaagttaatattttctatgagctgttccaataaattatttgttgtgactgcgttcaagtcataaatcatcttgatactatccagtaaaccgtttttaagttctggaatattatcatcccattgtaaagcccctaattcgactatcgaatatcctgctctgatagcagtttcaatatcgacggacgtcaatactgtaataaaggtggtagtattgtcatcatcgtgataaactacgggaatatggtcgttagtaggtacggtaactttacacaacgcgatatataactttccttttgtaccatttttaacgtagttgggacgtcctgcagggtattgttttgaagaaatgatatcgagaacagatttgatacgatatttgttggattcctgattattcactataatataatctagacagatagatgattcgataaatagagaaggtatatcgttggtaggataatacatccccattccagtattctcggatactctattgatgacactagttaagaacatgtcttctattctagaaaacgaaaacatcctacatggactcattaaaacttctaacgctcctgattgtgtctcgaatgcctcgtacaaggatttcaaggatgccatagattctttgaccaacgatttagaattgcgtttagcatctgatttttttattaaatcgaatggtcggctctctggtttgctaccccaatgataacaatagtcttgtaaagataaaccgcaagaaaatttatacgcatccatccaaataaccctagcaccatcggatgatattaatgtattattatagattttccatccacaattattgggccagtatactgttagcaacggtatatcgaatagattactcatgtaacctactagaatgatagttcgtgtactagtcataatatctttaatccaatctaaaaaatttaaaattagattttttacactgttaaagttaacaaaagtattacccgggtacgtggatatcatatatggcattggtccattatcagtaatagctccataaactgatacggcgatggtttttatatgtgtttgatctaacgaggaagaaattcgcgcccacaattcatctctagatatgtatttaatatcaaacggtaacacatcaatttcgggacgcgtatatgtttctaaatttttaatccaaatataatgatgacctatatgccctattatcatactgtcaactatagtacacctagggaacttacgatacatctgtttcctataatcgttaaattttacaaatctataacatgctaaaccttttgacgacagccattcattaatttctgatatggaatctgtattctcgataccgtatcgttctaaagccagtgctatatctccctgttcgtgggaacgctttcgtataatatcgatcaacggataatctgaagtttttggagaataatatgactcatgatctatttcgtccataaacaatctagacataggaattggaggcgatgatcttaattttgtgcaatgagtcgtcaatcctataacttctaatcttgtaatattcatcatcgacataatactatctatgttatcatcgtatattagtataccatgaccttcttcatttcgtgccaaaatgatatacagtcttaaatagttacgcaatatctcaatagtttcataattgttagctgttttcatcaaggtttgtatcctgtttaacatgatggcgttctataacgtctctattttctatttttaattttttaaatttttaacgatttactgtggctagatacccaatctctctcaaatatttttttagcctcgcttacaagctgtttatctatactattaaaactgacgaatccgtgattttggtaatgggttccgtcgaaatttgccgaagtgatatgaacatattcgtcgtcgactatcaacaattttgtattattctgaatagtgaaaaccttcacagatagatcattttgaacacacaacgcatctagacttttggcggttgccatagaatatacgtcgttcttatcccaattaccaactagaagtctgatcttaactcctctattaatggctgcttctataatggagttgtaaatgtcgggccaatagtagctattaccgtcgacacgtgtagtgggaactatggccaaatgttcaatatctatactagtcttagctgacctgagtttatcaataactacatcggtatctagatctctagaatatcccaataggtgttccggagaatcagtaaagaacactccacctataggattcttaatatgatacgcagtgctaactggcaaacaacaagccgcagagcataaattcaaccatgaattttttgcgctattaaaggctttaaaagtatcaaatcttctacgaagatctgtggccagcgggggataatcagaatatacacctaacgttttaatcgtatgtatagatcctccagtaaatgacgcgtttcctacataacatctttcatcatctgacacccaaaaacaaccgagtagtagtcccacattattttttttatctatattaacggttataaaatttatatccgggcagtgactttgtagctctcccagatttcttttccctcgttcatctagcaaaactattattttaatccctttttcagatgcctcttttagtttatcaaaaataagcgctcccctagtcgtactcagaggattacaacaaaaagatgctatgtatatatatttcttagctagagtgataatttcgttaaaacattcaaatgttgttaaatgatcggatctaaaatccatattttctggtagtgtttctaccagcctacattttgctcccgcaggtaccgatgcaaatggccacatttagttaacataaaaacttatacatcctgttctatcaacgattctagaatatcatcggctatatcgctaaaattttcatcaaagtcgacatcacaacctaactcagtcaatatattaagaagttccatgatgtcatcttcgtctatttctatatccgtatccattgtagattgttgaccgattatcgagtttaaatcattactaatactcaatccttcagaatacaatctgtgtttcattgtaaatttataggcggtgtatttaagttggtagattttcaattatgtattaatatagcaacagtagttcttgctcctccttgattctagcatcctcttcattattttcttctacgtacataaacatgtccaatacgttagacaacacaccgacgatggcggccgctacagacacgaatatgactaaaccgatgaccatttaaaaacccctctctagctttcacttaaactgtatcgatcattcttttagcacatgtataatataaaaacattattctatttcgaatttaggcttccaaaaatttttcatccgtaaaccgataataatatatatagacttgttaatagtcggaataaatagattaatgcttaaactatcatcatctccacgattagagatacaatatttacattctttttgctgtttcgaaactttatcaatacacgttaatacaaacccaggaaggagatattgaaactgaggctgttgaaaatgaaacggtgaatacaataattcagataatgtaaaatcatgattccgtattctgatgatattagaactgctaatggatgtcgatggtatgtatctaggagtatctattttaacaaagcatcgatttgctaatatacaattatccttttgattaattgttattttattcatattcttaaaaggtttcatatttatcaattcttctacattaaaaatttccatttttaatttatgtagccccgcaatactcctcattacgtttcattttttgtctataatatccattttgttcatctcggtacatagattatccaattgagaagcgcatttagtagttttgtacattttaagtttattgacgaatcgtcgaaaactagttatagttaacattttattatttgataccctgatattaatacccctgccgttactattatttataactgatgtaatccacgtaacattggaattaactatcgatagtaatgcatcgacgcttccaaaattgtctattataaactcaccgataatttttttattgcatgttttcatattcattaggattatcaaatctttaatcttattacgattgtatgcgttgatattacaagacgtcattctaaaagacggaggatctccatcaaatgccagacaatcacgtacaaagtacatggaaataggttttgttctattgcgcatcatagatttatatagaacacccgtagaaatactaatttgttttactctataaaatactaatgcatctatttcatcgttttgtataacgtctttccaagtgtcaaattccaaatttttttcattgatagtaccaaattcttctatctctttaactacttgcatagataggtaattacagtgatgcctacatgccgttttttgaaactgaatagatgcgtctagaagcgatgctacgctagtcacaatcaccactttcatatttagaatatatatatgtaaaaatatagtagaatttcattttgtttttttctatgctataaatgaattctcattttgcatctgctcatactccgttttatatcaataccaaagaaggaagatatctggttctaaaagccgttaaagtatgcgatgttagaactgtagaatgcgaaggaagtaaagcttcctgcgtactcaaagtagataaaccctcatcgcccgcgtgtgagagaagaccttcgtccccgtccagatgcgagagaatgaataaccctggaaaacaagttccgtttatgaggacggacatgctacaaaatatgttcgcggctaatcgcgataatgtagcttctagacttttgtcctaaaatactattatatccttttcgatattaataaatccgtgtcgtccaggttttttatctctttcagtatgtgaatagataggtattttatctctattcatcatcgaatttaagagatccgataaacattgtttgtattctccagatgtcagcatctgatacaacaatatatgtgcacataaacctctggcacttatttcatgtaccttccccttatcactaaggagaatagtatttgagaaatatgtatacatgatattatcatgaattagatatacagaatttgtaacactctcgaaatcacacgatgtgtcggcgttaagatctaatatatcactcgataacacattttcatctagatacactagacattttttaaagctaaaatagtctttagtagtaacagtaactatgcgattattttcatcgatgatacatttcatcggcatattattacgcttaccatcaaagactataccatgtgtatatctaacgtattctagcatggttgccatacgcgcattaaacttttcaggatctttggatagatcttccaatctatctatttgagaaaacatttttatcatgttcaatagttgaaacgtcggatccactatatagatattatctataaagattttaggaactacgttcatggtatcctggcgaatattaaaactatcaatgatatgattatcgttttcatcttttatcaccatatagtttctaagatatgggattttacttaatataatattatttcccgtgataaattttattagaaaggccaaatctataagaaaagtcctagaattagtctgaagaatatctatatcgccgtatagtatatttggattaattagatatagagaatatgatccgtaacatatacaacttttattatggcgtctaagatattcttccatcaacttattaacatttttgactagggaagatacattatgacgtcccattacttttgccttgtctattactgcgacgttcatagaatttagcatatctcttgccaattcttccattgatgttacattataagaaattttagatgaaattacatttggagctttaatagtaagaactcctaatatgtccgtgtatgtggtcactaatacagattgtagttctataatcgtaaataatttacctatattatatgtttgagtctgtttagaaaagtagctaagtatacgatcttttatttctgatgcagatgtattaacatcggaaaaaaatctttttttattcttttttactaaagatacaaatatgtctttgttaaaaacagttattttctgaatatttctagcttgtaattttaacatatgatattcgttcacactaggtactctgcctaaataggtttctataatctttaatgtaatattaggaaaagtattctgatcaggattcctattcattttgaggatttaaaactctgattattgtctaatatggtctctacgcaaactttttcacagagcgatagagtttttgataactcgtttttcttaagaaatataaaactactgtttccagagctcgctctatcttttattttatctaattcgatacaaactcctgatactggttcagaaagtaattcattaattttcagtcctttatagaagatatttaatatagataatacaaaatcttcagtttttgatatcgatctgattgatcctagaactagatatattaataacgtgctcattaggcagtttatggcagcttgataattagatatagtatattccagttcatatttattagataccgcattgcccagattttgatattctatgaattcctctgaaaataaatccaaaataactagacattctattttttgtggattagtgtactctcttccctctatcatgttcactactggtgtccacgatgataaatatctagagggaatataatatagtccataggatgccaatctagcaatgtcgaataactgtaatttgattcttcgttcttcattatgaattgattcttgaggtataaacctaacacaaattatattattagacttttcgtatgtaatgtctttcatgttataagtttttaatcctggaatagaatctattttaatgaggcttttaaacgcagagttctccaacgagtcaaaacataatactctgttgtttttcttatatacgatgttacgattttcttctttgaatggaataggtttttgaattagtttataattacaacataatagataaggaagtgtgcaaatagtacgcggaaaaaacataatagctcccctgttttcatccatggttttaagtaaatgatcactggcttctttagtcaatggatattcgaacattaaccgtttcatcatcattggacagaatccatatttcttaatgtaaagagtgatcaaatcattgtgtttattgtaccatcttgttgtaaatgtgtattcggttatcggatctgctcctttttctattaaagtatcgatgtcaatctcgtctaagaattcaactatatcgacatatttcatttgtatacacataaccattactaacgtagaatgtataggaagagatgtaacgggaacagggtttgttgattcgcaaactattctaatacataattcttctgttaatacgtcttgcacgtaatctattatagatgccaagatatctatataattattttgtaagatgatgttaactatgtgatctatataagtagtgtaataattcatgtattttgatatatgttccaactctgtctttgtgatgtctagtttcgtaatatctatagcatcctcaaaaaatatattcgcatatattcccaagtcttcagttctatcttctaaaaaatcttcaacgtatggaatataataatctattttacctcttctgatatcattaatgatatagtttttgacactatcttctgtcaattgattcttattcactatatctaagaaacggatagcgtccctaggacgaactactgccattaatatctctattatagcttctggacataattcatctattataccagaattaatgggaactattccgtatctatctaacatagttttaagaaagtcagaatctaagacttgatgttcatatattggttcatacatgaaatgatctctattgatgatagtgactatttcattctctgaaaattggtaactcattctatatatgctttccttgttgatgaaggatagaatatactcaatagaatttgtaccaacaaactgttctcttatgaatcgtatatcatcatctgaaataatcatgtaaggcatacatttaacaattagagacttgtctcctgttatcaatatactattcttgtgataatttatgtgtgaggcaaatttgtccacgttctttaattttgttatagtagatatcaaatccaatggagctacagttcttggcttaaacagatatagtttttctggaacaaattctacaacattattataaaggactttgggtaaataagtgggatgaaatcctattttaattaatgcgatagccttgtcctcgtgcagatatccaaacgcttttgtgatagtatggcattcattgtctagaaacgctctacgaatatctgtgacagatatcatctttagagaatatactagtcgcgttaatagtactacaatttgtattttttaatctatctcaataaaaaaattaatatgtatgattcaatgtataactaaactactaactgttattgataactagaatcagaatctaatgatgacgtacccaagaagtttatctactgccaatttagctgcattatttttagcatctcgtttagattttccatctgccttatcgaatactcttccgtcgatatctacacaggcataaaatgtaggagagttactaggcccaactgattcaatacgaaaagaccaatctctcttagttatttggcagtactcattaataacggtgacagggttagcatctttccaatcaataatttttttagccggaataacatcatcaaaagacttatgatcctctctcattgatttttcgcgggatacatcatctattatgacgtcagccataacatcagcatccggcttatccgcctccgttgtcataaaccaacgaggaggaatatcgtcggagctgtacaccatagcactacgttgaagatcgtacagagctttattaacttctcgcttctccatattaagttgtctagttagttgtgcagcagtagctccttcgattccaatggttttaatagcctcacacacaatctctgcgttagaacgttcgtcgatatagattttagacatttttagagagaactaacacaaccagcaataaaactgaacctactttatcatttttttattcatcatcctctggtggttcgtcgttcctatcaaatgtagctctgattaacccgtcatctataggtgatgctggttctggagattctggaggagatggattattatctggaagaatctctgttatttccttgttttcatgtatcgattgcgttgtaacattaagattgcgaaatgctctaaatttgggaggcttaaagtgttgtttgcaatctctacacgcgtgtctaactagtggaggttcgtcagctgctctagtttgaatcatcatcggcgtagtattcctacttttacagttaggacacggtgtattgtatttctcgtcgagaacgttaaaataatcgttgtaactcacatcctttattttatctatattgtattctactcctttcttaatgcattttataccgaataagagatagcgaaggaattctttttcggtgccgctagtacccttaatcatatcacatagtgttttatattccaaatttgtggcaatagacggtttatttctatacgatagtttgtttctggaatcctttgagtattctataccaatattattctttgattcgaatttagtttcttcgatattagattttgtattacctatattcttgatgtagtactttgatgatttttccatggcccattctattaagtcttccaagttggcatcatccacatattgtgatagtaattctcggatatcagtagcggctaccgccattgatgtttgttcattggatgagtaactactaatgtatacattttccatttataacacttatgtattaactttgttcatttatattttttcattattatgttgatattaacaaaagtgaatatatatatgttaataattgtattgtggttatacggctacaattttataatgagtgaaagtcagtgtccgatgatcaatgacgatagctttactctgaaaagaaagtatcaaatcgatagtgcggagtcaacaataaaaatggataagaagaggataaagtttcagaatagagccaaaatggtaaaagaaataaatcagacaataagagcagcacaaactcattacgagacattgaaactaggatacataaaatttaagagaatgattaggactactactctagaagatatagcaccatctattccaaataatcagaaaacttataaactattctcggacatttcagccatcggcaaagcatcacagaatccgagtaagatggtatatgctctgctgctttacatgtttcccaatttgtttggagatgatcatagattcattcgttatagaatgcatccaatgagtaaaatcaaacacaagatcttctctcctttcaaacttaatcttattagaatattagtggaagaaagattctataataatgaatgcagatctaataaatggaaaataattggaacacaagttgataaaatgttgatagctgaatctgataaatatacaatagatgcaaggtataacctaaaacccatgtatagaatcaagggagaatctgaagaagataccctcttcatcaaacagatggtagaacaatgtgtgacatcccaggaattggtggaaaaagtgttgaagatactgtttagagatttgttcaagagtggagaatacaaagcgtacagatacgatgatgatgtagaaaatggattcattggattggatacactaaaattaaacattgttcatgatatagttgaaccatgtatgcctgttcgtaggccagtggctaagatactgtgtaaagaaatggtaaataaatactttgagaatccgctacatattattggtaaaaatcttcaagagtgcattgactttgttagtgaataggcatttcatctttctccaatactaattcaaattgttaaattaataatggatagtataaatagttattagttataagatagtaaaaataattattagaataagagtgtagtatcatagataactctcttctataaaaatggattttattcgtagaaagtatcttatatacacagtagaaaataatatagattttttaaaggatgatacattaagtaaagtaaacaattttaccctcaatcatgtactagctctcaagtatctagttagcaattttcctcaacatgttattactaaggatgtattagctaataccaatttttttgttttcatacatatggtacgatgttgtaaagtgtacgaagcggttttacgacacgcatttgatgcacccacgttgtacgttaaagcattgactaagaattatttatcgtttagtaacgcaatacaatcgtacaaggaaaccgtgcataaactaacacaagatgaaaaatttttagaggttgccgaatacatggacgaattaggagaacttataggcgtaaattatgacttagttcttaatccattatttcacggaggggaacccatcaaagatatggaaatcatttttttaaaactgtttaagaaaacagacttcaaagttgttaaaaaattaagtgttataagattacttatttgggcatacctaagcaagaaagatacaggcatagagtttgcggataatgatagacaagatatatatactctatttcaacaaactggtagaatcgtccatagcaatctaacagaaacgtttagagattatatctttcccggagataagactagctattgggtgtggttaaacgaaagtatagctaatgatgcggatatcgttcttaatagacccgccattaccatgtatgataaaattcttagttatatatactctgagataaaacaaggacgcgttaataaaaacatgcttaagttagtttatatctttgagcctgaaaaagatatcagagaacttctgctagaaatcatatatgatattcctggagatatcctatctattattgatgcaaaaaacgacgattggaaaaaatattttattagtttttataaagctaattttattaacggtaatacatttattagtgatagaacgtttaacgaggacttattcagagttgttgttcaaatagatcccgaatatttcgataatgaacgaattatgtctttattctctacgagtgctgcggacattaaacgatttgatgagttagatattaataacagttatatatctaatataatttatgaggtgaacgatatcacattagatacaatggatgatatgaagaagtgtcaaatctttaacgaggatacgtcgtattatgttaaggaatacaatacatacctgtttttgcacgagtcggatcccatggtcatagagaacggaatactaaagaaactgtcatctataaaatccaagagtagacggctgaacttgtttagcaaaaacattttaaaatattatttagacggacaattggctcgtctaggtcttgtgttagatgattataaaggagacttgttagttaaaatgataaaccatcttaagtctgtggaggatgtatccgcattcgttcgattttctacagataaaaaccctagtattcttccatcgctaatcaaaactattttagctagttataatatttccatcatcgtcttatttcaaaggtttttgagagataatctatatcatgtagaagaattcttggataaaagcatccatctaaccaagacggataagaaatatatacttcaattgataagacacggtagatcatagaacagaccaaatatattattaataatttgtatatacatagatataattatcacacatttttgataaatgggaactgctgcaacaattcagactcccaccaaattaatgaataaagaaaatgcagaaatgattttggaaaaaattgttgatcatatagttatgtatattagtgacgaatcaagtgattcagaaaataatcctgaatatattgattttcgtaacagatacgaagactatagatctctcattataaaaagtgatcacgagtttgtaaagctatgtaaaaatcatgcggagaaaagttctccagaaacgcaacaaatgattatcaaacacatatacgaacaatatcttattccagtatctgaagtactattaaaacctataatgtccatgggtgacataattacatataacggatgtaaagacaatgaatggatgctagaacaactctctaccctaaactttaacaatctccgcacatggaactcatgtagcataggcaatgtaacgcgtctgttttatacattttttagttatctgatgaaagataaactaaatatataagtataatcccattctaatactttaacctgatgtattagcatcttattagaatattaacctaactaaaagacataacataaaaactcattacatagttgataaaaagcggtaggatataaatattatggctgccaccgttccgcgttttgacgacgtgtacaaaaatgcacaaagaagaattctagatcaagaaacattttttagtagaggtctaagtagaccgttaatgaaaaacacatatctatttgataattacgcgtatggatggataccagaaactgcaatttggagtagtagatacgcaaacttagatgcaagtgactattatcccatttcgttgggattacttaaaaagttcgagtttctcatgtctctatataaaggtcctattccagtatacgaagaaaaagtaaatactgaattcattgctaatggatctttctccggtagatacgtatcatatcttagaaagttttctgctcttccaacaaacgagtttattagttttttgttactgacttccattccaatctataatatcttgttctggtttaaaaatactcagtttgatattactaaacacacattattcagatacgtctatacagataatgccaaacacctggcgttggctaggtatatgtatcaaacaggagactataagcctttgtttagtcgtctcaaagagaattatatatttaccggtcccgttccaatatgtatcaaagatatagatcaccctaatcttagtagagcaagaagtccatccgattatgagacattagctaatattagtactatattgtactttaccaagtatgatccggtattaatgtttttattgttttacgtacctgggtattcaattactacaaaaattactccagccgtagaatatctaatggataaactgaatctaacaaagagcgacgtacaactgttgtaaattattttatgcttcgtaaaatgtaggttttgaaccaaacattctttcaaagaatgagatgcataaaactttattatccaatagattgactatttcggacgtcaatcgtttaaagtaaacttcgtaaaatattctttgatcactgccgagtttaaaacttctatcgataattgtttcatatgttttaatatttacaagttttttggtccatggtccattaggacaaatatatgcaaaataatatcgttctccaagttctatagtctctggattatttttattatattcagtaaccaaatacatattagggttatctgcggatttataatttgagtgatgcattcgactcaacataaataattctagaggagacgatctactatcaaattcggatcgtaaatctgtttctaaagaacggagaatatctatacatacctgattagaattcatccgtccttcagacaacatctcagacagtctggttttgtacatcttaatcatattcttatgaaacttggaaacatctcttctagtttcactagtacctttattaattctctcaggtacagattttgaattcgacgatgctgagtatttcatcgttgtatatttcttcttcgattgcataatcagattcttatataccgcctcaaactctattttaaaattattaaacaatactctattattaatcagtcgttctaactctttcgctatttctatagacttatctacatcttgactgtctatctctgtaaacacggagtcggtatctccatacacgctacgaaaacgaaatctgtaatctataggcaacgatgttttcacaatcggattaatatctctatcgtccatataaaatggattacttaatggattggcaaaccgtaacataccgttagataactctgctccatttagtaccgattctagatacaagatcattctacgtcctatggatgtgcaactcttagccgaagcgtatgagtatagagcactatttctaaatcccatcagaccatatactgagttggctactatcttgtacgtatattgcatggaatcatagatggccttttcagttgaactggtagcctgttttagcatctttttatatctggctctctctgccaaaaatgttcttaatagtctaggaatggttccttctatcgatctatcgaaaattgctatttcagagatgaggttcggtagtctaggttcacaatgaaccgtaatatatctaggaggtggatatttctgaagcaatagctgattatttatttcttcttccaatctattggtactaacaacgacaccgactaatgtttccggagatagatttccaaagatacacacattaggatacagactgttataatcaaagattaatacattattactaaacattttttgttttggagcaaataccttaccgccttcataaggaaacttttgttttgtttctgatctaactaagatagttttagtttccaacaatagctttaacagtggacccttgatgactgtactcgctctatattcgaataccatggattgaggaagcacatatgttgacgcacccgcgtctgtttttgtttctactccataatactcccacaaatactgacacaaacaagcatcatgaatacagtatctagccatatctaaagctatgtttagattataatccttatacatctgagctaaatcaacgtcatcctttccgaaagataatttatatgtatcattaggtaaagtaggacataatagtacgactttaaatccattttcccaaatatctttacgaattactttacatataatatcctcatcaacagtcacataattacctgtggttaaaacctttgcaaatgcagcggctttgcctttcgcgtctgtagtatcgtcaccgatgaacgtcatttctctaactcctctatttaatactttacccatgcaactgaacgcgttcttggatatagaatccaatttgtacgaatccaatttttcaaatttttgaatgaatgaatatagatcgaaaaatatagttccattattgttattaacgtgaaacgtagtattggccatgccgcctactcccttatgactagactgatttctctcataaatacagagatgtacagcttcctttttgtccggagatctaaagataattttctctcctgttaataactctagacgattagtaatatatctcagatcaaagttatgtccgttaaaggtaacgacgtagtcgaacgttagttccaacaattgtttagctattcgtaacaaaactatttcagaacatagaactagttctcgttcgtaatccatttccattagtgactgtatcctcaaacatcctctatcgacggcttcttgtatttcctgttccgttaacatctcttcattaatgagcgtaaacaataatcgtttaccacttaaatcgatataacagtaacttgtatgcgagattgggttaataaatacagaaggaaacttcttatcgaagtgacactctatatctagaaataagtacgatcttgggatatcgaatctaggtatttttttagcgaaacagttacgtggatcgtcacaatgataacatccattgttaatctttgtcaaatattgctcgtccaacgagtaacatccgtctggagatatcccgttagaaatataaaaccaactaatattgagaaattcatccatggtggcattttgtatgctgcgtttctttggctcttctatcaaccacatatctgcgacggagcattttctatctttaatatctagattataacttattgtctcgtcaatgtctatagttctcatctttcccaacggcctcgcattaaatggaggaggagacaatgactgatatatttcgtccgtcactacgtaataaaagtaatgaggaaatcgtataaatacggtctcaccatttcgacatctggatttcagatataaaaatctgttttcaccgtgactttcaaaccaattaatgcaccgaacatccatttatagaatttagaaatatattttcatttaaatgaatcccaaacattggggaagagccgtatggaccattatttttatagtactttcgcaagcgggtttagacggcaacatagaagcgtgtaaacgaaaactatatactatagttagcactcttccatgtcctgcatgtagacggcacgcgactatcgctatagaggacaataatgtcatgtctagcgatgatctgaattatatttattattttttcatcagattatttaacaatttggcatctgatcccaaatacgcgatcgatgtgacaaaggttaaccctttataaacttaacccattataaaacttatgattagtcacaactgaaataaccgcgtgattattttttggtataattctacacggcatggtttctgtgactatgaattcaacccccgttacattagtgaaatctttaacaaacagcaagggttcgtcaaagacataaaactcattgtttacaatcgaaatagaccccctatcacacttaaaataaaaaatatccttatcctttaccaccaaataaaattctgattggtcaatgtgaatgtattcacttaacagttccacaaatttatttattaactccgaggcacatacatcgtcggtattttttatggcaaactttactcttccagcatccgtttctaaaaaaatattaacgagttccatttatatcatccaatattattgaaatgacgttgatggacagatgatacaaataagaaggtacggtacctttgtccaccatctcctccaattcatgctctattttgtcattaactttaatgtatgaaaacagtacgccacatgcttccatgacagtgtgtaacactttggatacaaaatgtttgacattagtataattgttcaagactgtcaatctataatagatagtagctataatatattctatgatggtattgaagaagatgacaaccttggcatattgatcatttaacacagacatggtatcaacagatagcttgaatgaaagagaatcagtaattggaataagcgtcttctcgatagagtgtccgtataccaacatgtctgatattttgatgtattccattaaattatttagttttttctttttattctcgttaaacagcatttctgtcaacggaccccaacatcgttgaccgattaagttttgattgatttttccgtgtaaggcgtatctagtcagatcgtatagcctatccaataatccatcatctgtgcgtagatcacatcgtacactttttaattctctatagaagagcgacagacatctggagcaattacagacagcaatttctttattctctacagatgtaagatacttgaagacattcctatgatgatgcagaattttggataacacggtattgatggtatctgttaccataattcctttgatggctgatagtgtcagagcacaagatttccaatctttgacaatttttagcaccattatctttgttttgatatctatatcagacagcatggtgcgtctgacaacacagggattaagacggaaagatgaaatgattctctcaacatcttcaatagataccttgctattttttctggcattatctatatgtgcgagaatatcctctagagaatcagtatcctttttgatgatagtggatctcaatgacatgggacgtctaaaccttcttattctatcaccagattgcatggtgatttgtcttctttcttttatcataatgtaatctctaaattcatcggcaaattgtctatatctaaaatcataatatgagatgtttacctctacaaatatctgttcgtccaatgttagagtatttacatcagttttgtattccaaattaaacatggcaacggatttaattttatattcctctattaagtcctcgtcgataataacagaatgtagataatcatttaatccatcgtacatggttggaagatgcttgttgacaaaatctttaattgtcttgatgaaggtgggactatatctaacatcttgattaataaaatttataacattgtccataggatactttgtaactagttttatacacatctcttcatcggtaagtttagacagaatatcgtgaacaggtggtatattatattcatcagatatacgaagaacaatgtccaaatctatattgtttaatatattatataaatgtagcgtagctcctacaggaatatctttaactaagtcaatgatttcatcaaccgttagatctattttaaagttaatcatataggcattgatttttaaaaggtatgtagccttgactacattctcattaattaaccattccaagtcactgtgtgtaagaagattatattctatcataagcttgactacatttggtcccgataccattaaagaattcttatgatataaggaaacagcttttaggtactcatctactctacaagaattttggagagccttaacgatatcagtgacgtttattatttcaggaggaaaaaacctaacattgagaatatcggaattaatagcttccagatacagtgattttggcaatagtccgtgtaatccataatccagtaacacgagctggtgcttgctagacaccttttcaatgtttaatttttttgaaataagctttgataaagccttcctcgcaaattccggatacatgaacatgtcggcgacatgattaagtattgttttttcattattttctcaataccccaatagatgatagaatatcacccaatgcgtccatgttgtctatttccaacaggtcgctatatccaccaatagaagtttttccaaaaaagattctaggaacagttctaccaccagtaatttgttcaaaatagtcacgcaattcattttcgggtttaaattctttaatatcgacaatttcatacgctcctcttttgaaactaaacttatttagaatatccagtgcatttctacaaaaaggacatgtatacttgacaaaaattgtcactttgttattggccaacctttgttgtacaaattcctcggccattttaatatttaagtgatataaaactatctcgacttatttaactctttagtcgagatatatggacgcagatagctatatgatagccaactacagaaggcaaacgctataaaaaacataattacgacgagcatatttataaatatttttattcagcattacttgatatagtaatattaggcacagtcaaacattcaaccactctcgatacattaactctctcattttctttaacaaattctgcaatatcttcgtaaaaagattcttgaaactttttagaatatctatcgactctagatgaaatagcgttcgtcaacatactatgttttgtatacataaaggcgcctattttaacagtttctagtgacaaaatgctagcgatcctaggatcctttagaatcacatagattgacgattcgtctctcttagtaactctagtaaaataatcatacaatctagtacgcgaaataatattatccttgacttgaggagatctaaacaatctagttttgagaacatcgataagttcatcgggaatgacatacatactatctttaatagaactcttttcatccagttgaatggattcgtccttaaccaactgattaatgagatcttctattttatcattttccagatgatatgtatgtccattaaagttaaattgtgtagcgcttttttttagtctagcagccaatactttaacatcactaatatcgatatacaaaggagatgatttatctatggtattaagaattcgtttttcgacatccgtcaaaaccaattcctttttgcctgtatcatccagttttccatcctttgtaaagaaattattttctactagactattaataagactgataaggattcctccataattgcacaatccaaactttttcacaaaactagactttacaagatctacaggaatgcgtacttcaggtttcttagcttgtgattttttcttttgcggacattttctagtaaccaactcatctaccatttcattgattttagcagtgaaataagctttcaatgcacgggcactgatactattgaaaacgagttgatcttcaaattccgccatttaagttcaccaaacaacttttaaatacaaatatatcaatagtagtagaataagaactataaaaaaaataataattaaccaataccaaccccaacaaccggtattattagttgatgtgactgttttctcatcacttagaacagatttaacaatttctataaagtctgtcaaatcatcttccggagaccccataaatacaccaaatatagcggcgtacaacttatccatttatacattgaatattggcttttctttatcgctatcttcatcatattcatcatcaatatcaacaagtcccagattacgagccagatcttcttctacattttcagtcattgatacacgttcactatctccagagagtccgataacgttagccaccacttctctatcaatgattagtttcttgagcgcgaaagtaatttttgtttccgttccggatctatagaagacgataggtgtgataattgccttggccaattgtctttctcttttactgagtgattctagttcaccttctatagatctgagaatggatgattctccagtcgaaacatattctaccatggatccgtttaatttgttgatgaagatggattcatccttaaatgttttctctgtaatagtttccaccgaaagactatgcaaagaatttggaatgcgttccttgtgcttaatgtttccatagacggcttctagaagttgatacaacataggactagccgcggtaacttttatttttagaaagtatccatcgcttctatcttgtttagatttatttttataaagtttagtctctccttccaacataataaaagtggaagtcatttgactagataaactatcagtaagttttatagagatagacgaacaattagcgtattgagaagcatttagtgtaacgtattcgatacattttgcattagatttactaatcgattttgcatactctataacacccgcacaagtctgtagagaatcgctagatgcagtaggtcttggtgaagtttcaactctcttcttgattaccttactcatgattaaacctaaataattgtactttgtaatataatgatatatattttcactttatctcatttgagaataaaaatgtttttgtttaaccactgcatgatgtacagatttcggaatcgcaaaccaccagtggttttattttatccttgtccaatgtgaattgaatgggagcggatgcgggtttcgtacgtagatagtacattcccgtttttagaccgagactccatccgtaaaaatgcatactcgttagtttggaataactcggatctgctatatggatattcatagattgactttgatcgatgaaggctcccctgtctgcagccatttttatgatcgtcttttgtggaatttcccaaatagttttataaactcgcttaatatcttctggaaggtttgtattctgaatggatccaccatctgccataatcctattcttgatctcatcattccataattttctctcggttaaaactctaaggagatgcggattaactacttgaaattctccagacaatactctccgagtgtaaatattactggtatacggttccaccgactcattatttcccaaaatttgagcagttgatgcagtcggcataggtgccaccaataaactatttctaagaccgtatgttctgattttatcttttagaggttcccaattccaaagatccgacggtacaacattccaaagatcatattgtagaataccgttactggcgtacgatcctacatatgtatcgtatggtccttccttctcagctagttcacaactcgcctctaatgcaccgtaataaatggtttcgaagatcttcttatttagatcttgtgcttccaggctatcaaatggataatttaagagaataaacgcgtccgctaatccttgaacaccaataccgataggtctatgtctcttattagagatttcagcttctggaataggataataattaatatctataattttattgagatttctgacaattactttgaccacatccttcagtttgagaaaatcaaatcgcccatctattacaaacatgttcaaggcaacagatgccagattacaaacggctacctcattagcatccgcatattgtattatctcagtgcaaagattactacacttgatagttcctaaattttgttgattactctttttgttacacgcatccttataaagaatgaatggagtaccagtttcaatctgagattctataatcgctttccagacgactcgagcctttattatagatttgtatctcctttctctttcgtatagtgtatacaatcgttcgaactcgtctccccaaacattgtccaatccaggacattcatccggacacatcaacgaccactctccgtcatccttcactcgtttcataaagagatcaggaatccaaagagctataaatagatctctggttctatgttcctcgtttcctgtattctttttaagatcgaggaacgccataatatcagaatgccacggttccaagtatatggccataactccaggccgtttgtttcctccctgatctatgtatctagcggtgttattataaactctcaacattggaataataccgtttgatataccattggtaccggagatatagcttccactggcacgaatattactaattgatagacctattccccctgccattttagagattaatgcgcatcgttttaacgtgtcatagataccctctatgctatcatcgatcatgttaagtagaaaacagctagacatttggtgacgactagttcccgcattaaataaggtaggagaagcgtgcgtaaaccatttttcagaaagtagattgtacgtctcaatagctgagtctatatcccattgatgaattcctactgcgacacgcattaacatgtgctgaggtctttcaacgatcttgttgtttattttcaacaagtaggatttttccaaagttttaaaaccaaaatagttgtatgaaaagtctcgttcgtaaataataaccgagttgagtttatccttatatttgttaactatatccatggtgatacttgaaataatcggagaatgtttcccatttttaggattaacatagttgaataaatcctccatcacttcactaaatagtttttttgtttccttgtgtagatttgatacggctattctggcggctagaatggcataatccggatgttgtgtagtacaagtggctgctatttcggctgccagagtgtccaattctaccgttgttactccattatatattccttgaataaccttcatagctattttaataggatctatatgatccgtgtttaagccataacataattttctaatacgagacgtgattttatcaaacatgacattttccttgtatccatttcgtttaatgacaaacatttttgttggtgtaataaaaaaattatttaacttttcattaatagggatttgacgtatgtagcgtacaaaattatcgttcctggtatatagataaagagtcctatatatttgaaaatcgttacggctcgattaaactttaatgattgcatagtgaatatatcattaggatttaactccttgactatcatggcggcgccagaaattaccatcaaaagcattaatacagttatgccgatcgcagttagaacggttatagcatccaccatttatatctaaaaattagatcaaagaatatgtgacaaagtcctagttgtatactgagaattgacgaaacaatgtttcttacatatttttttcttattagtaactgacttaatagtaggaactggaaagctagacttgattattctataagtatagatacccttccagataatgttctctttgataaaagttccagaaaatgtagaattttttaaaaagttatcttttgctattaccaagattgtgtttagacgcttattattaatatgagtgatgaaatccacaccgcctctagatatcgcctttatttccacattagatggtaaatccaatagtgaaactatctttttaggaatgtatggactcgcgtttagaggagtgaacgtcttaggcgtcggaaaggatgattcatcaaacgaataaacaatttcacaaatggatgttaatgtattagtaggaaattttttgacgctagtggaattgaagattctaatggatgatgttctacctatttcatccgataacatgttaatttccgacaccaacggttttaatatttcgatgatatacggtagtctctctttcggacttatatagcttattccacaatacgagtcattatatactccaaaaaacaaaataactagtataaaatctgtatcgaatgggaaaaacgaaattatcgacataggtatagaatccggaacattgaacgtattaatacttaattctttttctgtggtaagtactgataggttattgacattgtatggttttaaatattctataacttgagacttgatagatattagtgatgaattgaaaattatttttatcaccacgtgtgtttcaggatcatcgtcgacgcccgtcaaccaaccgaacggagtaaaataaatatcattaatatatgctctaaatattagtatttttatcaatcctttgattatcatcttctcgtaggcgaatgattccatgatcaagagtgatttgagaacatcctccggagtattaatgggcttagtaaacagtccatcgttgcaataataaaagttatccaagttaaaggatattatgcattcgtttaaagatatcacctcatctgacggagacaattttttggtaggttttagagactttgaagctacttgtttaacaaagttattcatcgtcgtctactattctatttaattttgtagttaatttatcacatatcacattaattgactttttggtccacttttccatacgtttatattcttttaatcctgcgttatccgtttccgttatatccagggatagatcttgcaagttaaatagaatgctcttaaataatgtcattttcttatccgctaaaaatttaaagaatgtataaacctttttcagagatttgaaactcttaggtggtgtcctagtacacaatatcataaacaaactaataaacattccacattcagattccaacagctgattaacttccacattaatacagcctattttcgctccaaatgtacattcgaaaaatctgaataaaacatcgatgtcacaatttgtattatccaatacagaatgtttgtgattcgtgttaaaaccatcggagaaggaatagaaataaaaattattatagtggtggaattcagttggaatattgcctccggagtcataaaaggatactaaacattgttttttatcataaattacacatttccaatgagacaaataacaaaatccaaacattacaaatctagaggtagaacttttaattttgtctttaagtatatacgataagatatgtttattcataaacgcgtcaaatttttcatgaatcgctaaggagtttaagaatctcatgtcaaattgtcctatataatccacttcggatccataagcaaactgagagactaagttcttaatacttcgattgctcatccaggctcctctctcaggctctattttcatcttgacgacctttggattttcaccagtatgtattcctttacgtgataaatcatcgattttcaaatccatttgtgagaagtctatcgccttagatactttttcccgtagtcgaggtttaaaaaaatacgctaacggtatactagtaggtaactcaaagacatcatatatagaatggtaacgcgtctttaactcgtcggttaactctttcttttgatcgagttcgtcgctactattgggtctgctcaggtgccccgactctactagttccaacatcataccgataggaatacaagacactttgccggcggttgtagatttatcatatttttccactacatatccgttacaatttgttaaaaatttagatacatctatattgctacataatccagctagtgaatatatatgacataataaattggtaaatcctagttctggtattttactaattactaaatctgtatatctttccatttatcatggaaaagaatttaccagatatcttcttttttccaaactgcgttaatgtattctcttacaaatattcacaagatgaattcagtaatatgagtaaaacggaacgtgatagtttctcattggccgtgtttccagttataaaacatagatggcataacgcacacgttgtaaaacataaaggaatatacaaagttagtacagaagcacgtggaaaaaaagtatctcctccatcactaggaaaacccgcacacataaacctaaccgcgaagcaatatatatacagtgaacacacaataagctttgaatgttatagttttctaaaatgtataacaaatacagaaatcaattcgttcgatgagtatatattaagaggactattagaagctggtaatagtttacagatattttccaattccgtaggtaaacgaacagatactataggtgtactagggaataagtatccatttagcaaaattccattggcctcattaactcctaaagcacaacgagagatattttcagcgtggatttctcatagacctgtagttttaactggaggaactggagtgggtaagacgtcacaggtacccaagttattgctttggtttaattatttatttggtggattctctactctagataaaatcactgactttcacgaaagaccagtcattctatctcttcctaggatagctttagttagattgcatagcaataccattttaaaatcattgggatttaaggtactagatggatctcctatttctttacggtacggatctataccggaagaattaataaacaaacaaccaaaaaaatatggaattgtattttctacccataagttatctctaacaaaactatttagttatggcactcttattatagacgaagttcatgagcatgatcaaataggagatattattatagcagtagcgagaaagcatcatacgaaaatagattctatgtttttaatgactgccacgttagaggatgacagggaacggctaaaagtatttttacctaatcccgcatttatacatattcctggagatacactgtttaaaattagcgaggtatttattcataataagataaatccatcttccagaatggcatacatagaagaagaaaagagaaatttagttactgctatacagatgtatactcctcctgatggatcatccggtatagtctttgtggcatccgttgcacagtgtcacgaatataaatcatatttagaaaaaagattaccgtatgatatgtatattattcatggtaaggtcttagatatagacgaaatattagaaaaagtgtattcatcacctaatgtatcgataattatttctactccttatttggaatccagcgttactatacgcaatgttacacacatttatgatatgggtagagtttttgtccccgctccttttggaggatcgcaacaatttatttctaaatctatgagagatcaacgaaaaggaagagtaggaagagttaatcctggtacatacgtctatttctatgatctgtcttatatgaagtctatacagcgaatagattcagaatttctacataattatatattgtacgctaataagtttaatctaacactccccgaagatttgtttataatccctacaaatttggatattctatggcgtacaaaggaatatatagactcgttcgatattagtacagaaacatggaataaattattatccaattattatatgaagatgatagagtatgctaaactttatgtactaagtcctattctcgctgaggagttggataactttgagaggacgggagaattaactagtattgtacgagaagccattttatctctaaatttacaaattaagattttaaattttaaacataaagatgatgatacgtatatacacttttgtaaaatattattcggtgtctataacggaacaaacgctactatatattatcatagacctctaacgggatatatgaatatgatttcagatactatatttgttcctgtagataataactaaaaatcaaactctaatgaccacatctttttttagagatgaaaaattttccacatctccttttgtagacacgactaaacattttgcagaaaaaagtttattagtgtttagataatcgtatacttcatcagtgtagatagtaaatgtgaacagataaaaggtattcttgctcaatagattggtaaattccatagaatatattaatcctttcttcttgagatcccacatcatttcaaccagagacgttttatccaatgatttacctcgtactataccacatacaaaactagattttgcagtgacgtcgtacctggtattcctaccaaacaaaattttacttttagttcttttagaaaattctaaggtagaatctctatttgccaatatgtcatctatggaattaccactagcaaaaaatgatagaaatatatattgatacatcgcagctggttttgatctactatactttaaaaacgaatcagattccataattgcctgtatatcatcagctgaaaaactatgttttacacgtattccttcggcatttctttttaatgatatatcttgtttagacaatgataaagttatcatgtccatgagagacgcgtctccgtatcgtataaatatttcattagatgttagacgcttcattaggggtatacttctataaggtttcttaatcagtccatcattggttgcgtcaagaactactatcggatgttgttgggtatctctagtgttacacatggccttactaaagtttgggtaaataactatgatatctctattaattatagatgcatatatttcattcgtcaaggatattagtatcgacttgctatcgtcattaatacgtgtaatgtaatcatataaatcatgcgatagccaaggaaaatttaaatagatgttcatcatataatcgtcgctataattcatattaatacgttgacattgactaatttgtaatatagcctcgccacgaagaaagctctcgtattcagtttcatcgataaaggataccgttaaatataactggttgccgatagtctcatagtctattaagtggtaagtttcgtacaaatacagaatccctaaaatattatctaatgttggattaatctttaccataactgtataaaatggagacggagtcataactattttaccgtttgtacttactggaatagatgaaggaataatctccggacatgctggtaaagacccaaatgtctgtttgaagaaatccaatgttccaggtcctaatctcttaacaaaaattacgatattcgatcccgatatcctttgcattctatttaccagcatatcacgaactatattaagattatctatcatgtctattctcccaccgttatataaatcgcctccgctaagaaacgttagtatatccatacaatggaatacttcatttctaaaatagtattcgttttctaattctttaatgtgaaatcgtatactagaaagggaaaaattatctttgagttttccgttagaaaagaaccacgaaactaatgttctgattgcgtccgattccgttgctgaattaatggatttacaccaaaaactcatataacttctagatgtagaagcattcgctaaaaaattagtagaatcaaaggatataagtagatgttccaacaagtgagcaattcccaagatttcatctatatcattctcgaatccgaaattagaaattcccaagtagatatcctttttcatccgatcgttgatgaaaatacgaactttattcggtaagacaatcatttactaaggagtaaaataggaagtaatgttcgtatgtcgttatcatcgtataaattaaaggtgtgttttttaccattaagtgacattataattttaccaatattggaattataatataggtgtatttgcgcactcgcgacggttgatgcatcggtaaatatagctgtatctaatgttctagtcggtatttcatcatttcgctgtctaataatagcgttttctctatctgtttccattacagctgcctgaagtttattggtcggataatatgtaaaataataagaaatacatacgaataacaaaaataaaataagatataataaagatgccatttagagatctaattttgtttaacttgtccaaattcctacttacagaagatgaggaatcgttggagatagtgtcttccttatgtagaggatttgaaatatcttataatgacttgataacttactttccagataggaaataccataaatatatttataaagtatttgaacatgtagatttatcggaggaattaagtatggaattccatgatacaactctgagagatttagtctatcttagattgtacaagtattccaagtgtatacggccgtgttataaattaggagataatctaaaaggcatagttgttataaaggacaggaatatttatattagggaagcaaatgatgacttgatagaatatctcctcaaggaatacactcctcagatttatacatattctaatgagcgcgtccccataactggttcaaaattaattctttgtggattttctcaagttacatttatggcgtatacaacgtcgcatataacaacaaataaaaaggtagatgttctcgtttccaaaaaatgtatagatgaactagtcgatccaataaattatcaaatacttcaaaatttatttgataaaggaagcggaacaataaacaaaatactcaggaagatattttattcggtaacaggtggccaaactccataggtagctttttctatttcggattttagaatttccaaattcaccagcgatttatcggttttggtgaaatccaaggatttattaatgtccacaaatgccatttgttttgtctgtggattgtatttgaaaatggaaacgatgtagttagatagatgcgctgcgaagtttcctattagggttccgcgcttcacgtcacccagcatacttgaatcaccatcctttaaaaaaaatgataagatatcaacatggagtatatcatactcggattttaattcttctactgcatcactgacattttcacaaatactacaatacggtttaccgaaaataatcagtacgttcttcatttatgggtatcaaaaacttaaaatcgttactgctggaaaataaatcactgacgatattagatgataatttatacaaagtatacaatggaatatttgtggatacaatgagtatttatatagccgtcgccaattgtgtcagaaacttagaagagttaactacggtattcataaaatacgtaaacggatgggtaaaaaagggagggcatgtaaccctttttatcgatagaggaagtataaaaattaaacaagacgttagagacaagagacgtaaatattctaaattaaccaaggacagaaaaatgttagaattagaaaagtgtacatccgaaatacaaaatgttaccggatttatggaagaagaaataaaggcagaaatgcaattaaaaatcgataaactcacatttcaaatatatttatctgattctgataacataaaaatatcattgaatgagatactaacacatttcaacaataatgagaatgttacattattttattgtgatgaacgagacgcagaattcgttatgtgtctcgaggctaaaacacatttctctaccacaggagaatggccgttgataataagtaccgatcaggatactatgctatttgcatctgctgataatcatcctaagatgataaaaaacttaactcaactgtttaaatttgttccctcggcagaggataactatttagcaaaattaacggcgttagtgaatggatgtgatttctttcctggactctatggggcatctataacacccaccaacttaaacaaaatacaattgtttagtgattttacaatcgataatatagtcactagtttggcaattaaaaattattatagaaagactaactctaccgtagacgtgcgtaatattgttacgtttataaacgattacgctaatttagacgatgtctactcgtatattcctccttgtcaatgcactgttcaagaatttatattttccgcattagatgaaaaatggaatgaatttaaatcatcttatttagaaagcgtgccgttaccctgccaattaatgtacgcgttagaaccacgcaaggagattgatgtttcagaagttaaaactttatcatcttatatagatttcgaaaatactaaatcagatatcgatgttataaaatctatatcctcgatcttcggatattctaacgaaaactgtaacacgatagtattcggcatctataaggataatttactactgagtataaataattcattttactttaacgatagtctgttaataaccaatactaaaagtgataatataataaatataggttactagattaaaaatggtgttccaactcgtgtgctctacatgcggtaaagatatttctcacgaacgatataaattgattatacgaaaaaaatcattaaaggatgtactcgtcagtgtaaagaacgaatgttgtaggttaaaattatctacacaaatagaacctcaacgtaacttaacagtgcaacctctattggatataaactaatatggatccggttaattttatcaagacatatgcgcctagaggttctattatttttattaattataccatgtcattaacaagtcatttgaatccatcgatagaaaaacatgtgggtatttattatggtacgttattatcggaacacttggtagttgaatctacctatagaaaaggagttcgaatagtcccattggatagtttttttgaaggatatcttagtgcaaaagtatacatgttagagaatattcaagttatgaaaatagcagctgatacgtcattaactttattgggtattccgtatggatttggtcataatagaatgtattgttttaaattggtagctgactgttataaaaatgccggtattgatacatcgtctaaacgaatattgggcaaagatatttttctgagccaaaacttcacagacgataatagatggataaagatatatgattctaataatttaacattttggcaaattgattaccttaaagggtgagttaatatgcataactactcctccgttgttttttccctcgttctttttcttaacgttgtttgccatcactctcataatgtaaagatattctaaaatggtaaacttttgcatatcggacgcagaaattggtataaatgttgtaattgtattatttcccgtcaatggactagtcacagctccatcagttttatatcctttagagtatttctcactcgtgtctaacattctagagcattccatgatctgtttatcgttgatattggccggaaagatagattttttattttttattatattactattggcaattgtagatataacttctggtaaatatttttctaccttttcaatctcttctattttcaagccggctatatattctgctatattgttgctagtatcaataccttttctggctaagaagtcatatgtggtattcactatatcagttttaactggtagttccattagcctttccacttctgcagaataatcagaaattggttctttaccagaaaatccagctactataataggctcaccgatgatcattggcaaaatcctatattgtaccagattaatgagagcatatttcatttccaataattctgctagttcttgagacattgatttatttgatgaatctagttggttctctagatactctaccatttctgccgcatacaataacttgttagataaaatcagggttatcaaagtgtttagcgtggctagaatagtgggcttgcatgtattaaagaatgcggtagtatgagtaaaccgttttaacgaattatatagtctccagaaatctgtggcgttacatacatgagccgaatgacatcgaagattgtccaatatttttaatagctgctctttgtccattatttctatatttgactcgcaacaattgtagataccattaatcaccgattcctttttcgatgccggacaatagcacaattgtttagctttggactctatgtattcagaattaatagatatatctctcaatacagattgcactatacattttgaaactatgtcaaaaattgtagaacgacgctgttctgcagccatttaactttaaataatttacaaaaatttaaaatgagcatccgtataaaaatcgataaactgcgccaaattgtggcatatttttcagagttcagtgaagaagtgtctataaatgtagactcgacggatgagttaatgtatatttttgccgccttgggcggatctgtaaacatttgggccattatacctctcagtgcatcagtgttttaccgaggagccgaaaacattgtgtttaatcttccggtgtccaaggtaaaatcgtgtttgtgtagttttcacaatgatgccatcatagatatagaacctgatctggaaaataatctagtaaaactttctagttatcatgtagtaagtgtcgattgtaataaggaactgatgcctattaggacagatactactatttgtctaagtatagatcaaaagaaatcttacgtgtttaattttcacaagtatgaagaaaaatgttgtggtagaaccgtcattcatttagaatggttgttgggctttatcaagtgtattagtcagcatcagcatttggctattatgtttaaagatgacaatattattatgaagactcctggtaatactgatgcattttccagggaatattctatgactgaatgttctcaagaactacaaaagttttctttcaaaatagctatctcgtctctcaacaaactacgaggattcaaaaagagagtcaatgtttttgaaactagaatcgtaatggataatgacgataacattttaggaatgttgttttcggatagagttcaatcctttaagatcaacatctttatggcgtttttagattaatactttcaatgagataaatatgggtggcggagtaagtgttgagctccctaaacgggatccgcctccgggagtacccactgatgagatgttattaaacgtggataaaatgcatgacgtgatagctcccgctaagcttttagaatatgtgcatataggaccactagcaaaagataaagaggataaagtaaagaaaagatatccagagtttagattagttaacacaggacccggtggtctttcggcattgttaagacaatcgtataatggaaccgcacccaattgctgtcgcacttttaatcgtactcattattggaagaaggatggaaagatatcagataagtatgaagagggtgcagtattagaatcgtgttggccagacgttcacgacactggaaaatgcgatgttgatttattcgactggtgtcagggggatacgttcgatagaaacatatgccatcagtggatcggttcagcctttaataggagtaatagaactgtagagggtcaacaatcgttaataaatctgtataataagatgcaaacattatgtagtaaagatgctagtgtaccaatatgcgaatcatttttgcattatttacgcgcacacaatacagaagatagcaaagagatgatcgattatattctaagacaacagtctgcggactttaaacagaaatatatgagatgtagttatcccactagagataagttagaagagtcattaaaatatgcggaacctcgagaatgttgggatccagagtgttcgaatgccaatgttaatttcttactaacacgtaattataataatttaggactttgcaatattgtacgatgtaatactagcgtgaacaacttacagatggataaaacttcctcattaagattgtcatgtggattaagcaatagtgatagattttctactgttcccgtcaatagagcaaaagtagttcaacataatattaaacactcgttcgacctaaaattgcatttgatcagtttattatctctcttggtaatatggatactaattgtagctatttaaatgggtgccgcggcaagcatacagacgacggtgaatacactcagcgaacgtatctcgtctaaattagaacaagaagcgaacgctagtgctcaaacaaaatgtgatatagaaatcggaaatttttatatccgacaaaaccatggatgtaacctcactgttaaaaatatgtgctctgcggacgcggatgctcagttggatgctgtgttatcagccgctacagaaacatatagtggattaacaccggaacaaaaagcatacgtgccagctatgtttactgctgcgttaaacattcagacgagtgtaaacactgttgttagagattttgaaaattatgtgaaacagacttgtaattctagcgcggtcgtcgataacaaattaaagatacaaaacgtaatcatagatgaatgttacggagccccaggatctccaacaaatttggaatttattaatacaggatctagcaaaggaaattgtgccattaaggcgttgatgcaattgactactaaggccactactcaaatagcacctaaacaagttgctggtacaggagttcagttttatatgattgttatcggtgttataatattggcagcgttgtttatgtactatgccaagcgtatgttgttcacatccaccaatgataaaatcaaacttattttagccaataaggaaaacgtccattggactacttacatggacacattctttagaacttctccgatggttattgctaccacggatatgcaaaactgaaaatatattgataatattttaatagattaacatggaagttatcgctgatcgtctagacgatatagtgaaacaaaatatagcggatgaaaaatttgtagattttgttatacacggtctagagcatcaatgtcctgctatacttcgaccattaattaggttgtttattgatatactattatttgttatagtaatttatatttttacggtacgtctagtaagtagaaattatcaaatgttgttggtgttggtggcgctagtcatcacattaactattttttattactttatactataatagtactagactgacttctaacaaacatctcacctgccataaataaatgcttgatattaaagtcttctatttctaacactattccatctgtggaaaataatactctgacattatcgctaattgacacatcggtgagtgatatgcctataaagtaataatcttctttgggcacatataccagtgtaccaggttctaacaacctatttactggtgctcctgtagcatactttttctttaccttgagaatatccatcgtttgcttggtcaatagcgatatgtgattttttatcaaccactcgaaaaagtaattggagtgttcatatcctctacgggctattgtctcatggccgtgtatgaaatttaagtaacacgactgtggtagatttgttctatagagccggttgccgcaaatagatagaactaccaatatgtctgtacaaatgttaaacattaattgattaacagaaaaaacaatgttcgttctgggaatagaaaccagatcaaaacaaaattcgttagaatatatgccacgtttatacatggaatataaaataactacagtttgaaaaataacagtatcatttaaacatttaacttgcggggttaatctcacaactttactgtttttgaactgttcaaaatatagcatcgatccgtgagaaatacgtttagccgcctttaatagaggaaatcccaccgcctttctggatctcaccaacgacgatagttctgaccagcaactcatttcttcatcatccacctgttttaacatataataggcaggagatagatatccgtcattgcaatattccttctcgtaggcacacaatctaatattgataaaatctccattctcttctctgcatttattatcttgtctcggtggctgattaggctgtggtcttggtttaggccttggtctatcgttgttgaatctattttggtcattaaatctttcatttcttcctggtatatttctatcacctcgtttggttggatttttgtctatattatcgtttgtaacatcggtacgggtattcatttatcacaaaaaaaacttctctaaatgagtctactgctagaaaacctcatcgaagaagataccatattttttgcaggaagtatatctgagtatgatgatttacaaatggttattgccggcgcaaaatccaaatttccaagatctatgctttctatttttaatatagtacctagaacgatgtcaaaatatgagttggagttgattcataacgaaaatatcacaggagcaatgtttaccacaatgtataatataagaaacaatttgggtctaggagatgataaactaactattgaagccattgaaaactatttcttggatcctaacaatgaagttatgcctcttattattaataatacggatatgactgccgtcattcctaaaaaaagtggtaggagaaagaataagaacatggttatcttccgtcaaggatcatcacctatcttgtgcattttcgaaactcgtaaaaagattaatatttataaagaaaatatggaatccgcgtcgactgagtatacacctatcggagacaacaaggctttgatatctaaatatgcgggaattaatgtcctgaatgtgtattctccttccacatccataagattgaatgccatttacggattcaccaataaaaataaactagagaaacttagtactaataaggaactagaatcgtatagttctagccctcttcaagaacccattaggttaaatgattttctgggactattggaatgtgttaaaaagaatattcctctaacagatattccgacaaaggattgattactataaatggagaatgttcctaatgtatactttaatcctgtgtttatagagcccacgtttaaacattctttattaagtgtttataaacacagattaatagttttatttgaagtattcgttgtattcattctaatatatgtattttttagatctgaattaaatatgttcttcatgcctaaacgaaaaatacccgatcctattgatagattacgacgtgctaatctagcgtgtgaagacgataaattaatgatctatggattaccatggatgacaactcaaacatctgcgttatcaataaatagtaaaccgatagtgtataaagattgtgcaaagcttttgcgatcaataaatggatcacaaccagtatctcttaacgatgttcttcgcagatgatgattcattttttaagtatttggctagtcaagatgatgaatcttcattatctgatatattgcaaatcactcaatatctagactttctgttattattattgatccaatcaaaaaataaattagaagccgtgggtcattgttatgaatctctttcagaggaatacagacaattgacaaaattcacagactctcaagattttaaaaaactgtttaacaaggtccctattgttacagatggaagggtcaaacttaataaaggatatttgttcgactttgtgattagtttgatgcgattcaaaaaagaatcctctctagctaccaccgcaatagatcctattagatacatagatcctcgtcgcgatatcgcattttctaacgtgatggatatattaaagtcgaataaagtgaacaataattaattctttattgtcatcatgaacggcggacatattcagttgataatcggccccatgttttcaggtaaaagtacagaattaattagacgagttagacgttatcaaatagctcaatataaatgcgtgactataaaatattctaacgataatagatacggaacgggactatggacgcatgataagaataattttgaagcattggaagcaactaaactatgtgatgtcttggaatcaattacagatttctccgtgataggtatcgatgaaggacagttctttccagacattgttgaattctgtgagcgtatggcaaacgaaggaaaaatagttatagtagccgcactcgatgggacatttcaacgtaaaccgtttaataatattttgaatcttattccattatctgaaatggtggtaaaactaactgctgtgtgtatgaaatgctttaaggaggcttccttttctaaacgattgggtgaggaaaccgagatagagataataggaggtaatgatatgtatcaatcggtgtgtagaaagtgttacgtcggctcataatattatattttttatctaaaaaactaaaaataaacattgattaaattttaatataatacttaaaaatggatgttgtgtcgttagataaaccgtttatgtattttgaggaaattgataatgagttagattacgaaccagaaagtgcaaatgaggtcgcaaaaaaactgccgtatcaaggacagttaaaactattactaggagaattattttttcttagtaagttacagcgacacggtatattagatggtgccaccgtagtgtatataggatcggctcctggtacacatatacgttatttgagagatcatttctataatttaggagtgatcatcaaatggatgctaattgacggccgccatcatgatcctattttaaatggattgcgtgatgtgactctagtgactcggttcgttgatgaggaatatctacgatccatcaaaaaacaactgcatccttctaagattattttaatttctgatgtgagatccaaacgaggaggaaatgaacctagtacggcggatttactaagtaattacgctctacaaaatgtcatgattagtattttaaaccccgtggcatctagtcttaaatggagatgcccgtttccagatcaatggatcaaggacttttatatcccacacggtaataaaatgttacaaccttttgctccttcatattcagctgaaatgagattattaagtatttataccggtgagaacatgagactgactcgagttaccaaattagacgctgtaaattatgaaaaaaagatgtactaccttaataagatcgtccgtaacaaagtagttgttaactttgattatcctaatcaggaatatgactattttcacatgtactttatgctgaggaccgtgtactgcaataaaacatttcctactactaaagcaaaggtactatttctacaacaatctatatttcgtttcttaaatattccaacaacatcaactgaaaaagttagtcatgaaccaatacaacgtaaaatatctagcaaaaattctatgtctaaaaacagaaatagcaagagatccgtacgcggtaataaatagaaacgtactactgagatatactaccgatatagagtataatgatttagttactttaataaccgttagacataaaattgattctatgaaaactgtgtttcaggtatttaacgaatcatccataaattatactccggttgatgatgattatggagaaccaatcattataacatcgtatcttcaaaaaggtcataacaagtttcctgtaaattttctatacatagatgtggtaatatctgacttatttcctagctttgttagactagatactacagaaactaatatagttaatagtgtactacaaacaggcgatggtaaaaagactcttcgtcttcccaaaatgttagagacggaaatagttgtcaagattctctatcgccctaatataccattaaaaattgttagatttttccgcaataacatggtaactggagtagagatagccgatagatctgttatttcagtcgctgattaatcaattagtagagatgagataagaacattataataatcaataatatatcttatatcttatatcttatatcttatatcttgtttagaaaaatgctaatattaaaatagctaacgctagtaatccaatcggaagccatttgatatctataatagggtatctaatttcctgatttaaatagcggacagctatattctcggtagctactcgtttggaatcacaaacattatttacatctaatttactatctgtaatggaaacgtttcccaatgaaatggtacaatccgatacattgcattttgttatatttttttttaaagaggctggtaacaacgcatcgcttcgtttacatggctcgtaccaacaataatagggtaatcttgtatctattcctatccgtactatgcttttatcaggataaatacatttacatcgtatatcgtctttgttagcatcacagaatgcataaatttgttcgtccgtcatgataaaaatttaaagtgtaaatataactattatttttatagttgtaataaaaagggaaatttgattgtatactttcggttctttaaaagaaactgacttgataaaaatggctgtaatctctaaggttacgtatagtctatatgatcaaaaagagattaatgctacagatattatcattagtcatgttaaaaatgacgacgatatcggtaccgttaaagatggtagactaggtgctatggatggggcattatgtaagacttgtgggaaaacggaattggaatgtttcggtcactggggtaaagtaagtatttataaaactcatatagttaagcctgaatttatttcagaaattattcgtttactgaatcatatatgtattcactgcggattattgcgttcacgagaaccgtattccgacgatattaacctaaaagagttatcgggacacgctcttaggagattaaaggataaaatattatccaagaaaaagtcatgttggaacagtgaatgtatgcaaccgtatcaaaaaattactttttcaaagaaaaaggtttgtttcgtcaacaagttggatgatattaacgttcctaattctctcatctatcaaaagttaatttctattcatgaaaagttttggccattattagaaattcatcaatatccagctaacttattttatacagactactttcccatccctccgttgattattagaccggctattagtttttggatagatagtatacccaaagagaccaatgaattaacttacttattaggtatgatcgttaagaattgtaacttgaatgctgatgaacaggttatccagaaggcggtaatagaatacgatgatattaaaattatttctaataacactaccagtatcaatttatcatatattacatccggcaaaaataatatgattagaagttatatcgtcgcccgacgaaaagatcagaccgctagatctgtaattggtcccagtacatctatcaccgttaatgaggtaggaatgcccgcatatattagaaatacacttacagaaaagatatttgttaatgcctttacagtggataaagttaaacaactattagcgtcaaaccaagttaaattttactttaataaacgattaaaccaattaacaagaatacgccaaggaaagtttattaaaaataaaatacatttattgcctggtgattgggtagaagtagctgttcaagaatatacaagtattatttttggaagacagccgtctctacatagatacaacgtcatcgcttcatctatcagagctaccgaaggagatactatcaaaatatctcccggaattgccaactctcaaaatgctgatttcgacggggatgaggaatggatgatattagaacaaaatcctaaagctgtaattgaacaaagtattcttatgtatccgacgacgttactcaaacacgatattcatggagcccccgtttatggatctattcaagatgaaatcgtagcagcgtattcattgtttaggatacaagatctttgtttagatgaagtattgaacatcttggggaaatatggaagagagttcgatcctaaaggtaaatgtaaattcagcggtaaagatatctatacttacttgataggtgaaaagattaattatccgggtctcttaaaggatggtgaaattattgcaaacgacgtagatagtaattttgttgtggctatgaggcatctgtcattggctggactcttatccgatcataagtcgaacgtggaaggtatcaactttattatcaagtcatcttatgtttttaagagatatctatctatttacggttttggggtgacattcaaagatctgagaccaaattcgacgttcactaataaattggaggccatcaacgtagaaaaaatagaacttatcaaagaagcatacgccaaatatctcaacgatgtaagagacgggaaaatagttccattatctaaagctttagaggcggactatgtggaatccatgttatccaacttgacaaatcttaatatccgagagatagaagaacatatgagacaaacgctgatagatgatccagataataacctcctgaaaatggccaaagcgggttataaagtaaatcccacagaactaatgtatattctaggtacgtatggacaacaaaggattgatggtgaaccagcagagactcgagtattgggtagagttttaccttactatcttccagactctaaggatccagaaggaagaggttatattcttaattctttaacaaaaggattaacgggttctcaatattacttttcgatgctggttgcaagatctcaatctactgatatcgtctgtgaaacatcacgtaccggaacactggctagaaaaatcattaaaaagatggaggatatggtggtcgacggatacggacaagtagttataggtaatacgctcatcaagtacgccgccaattataccaaaattctaggctcagtatgtaaacctgtagatcttatctatccagatgagtccatgacttggtatttggaaattagtgctctgtggaataaaataaaacagggattcgtttactctcagaaacagaaacttgcaaagaagacattggcgccgtttaatttcctagtattcgtcaaacccaccactgaggataatgctattaaggttaaggatctgtacgatatgattcataacgtcattgatgatgtgagagagaaatacttctttacggtatctaatatagattttatggagtatatattcttgacgcatcttaatccttctagaattagaattacaaaagaaacggctatcactatctttgaaaagttctatgaaaaactcaattatactctaggtggtggaactcctattggaattatttctgcacaggtattgtctgagaagtttacacaacaagccctgtccagttttcacactactgaaaaaagtggtgccgtcaaacaaaaacttggtttcaacgagtttaataacttgactaatttgagtaagaataagaccgaaattatcactctggtatccgatgatatctctaaacttcaatctgttaagattaatttcgaatttgtatgtttgggagaattaaatccagacatcactcttcgaaaagaaacagataggtatgtagtagatataatagtcaatagattatacatcaagagagcagaaataaccgaattagtcgtcgaatatatgattgaacgatttatctcctttagcgtcattgtaaaggaatggggtatggaaacattcattgaggatgaggataatattagatttactgtctacctaaatttcgttgaaccggaagaattgaatcttagtaagtttatgatggttcttccgggtgccgccaacaagggaaagattagtaaattcaagattcctatctctgactatacgggatatgacgacttcaatcaaacaaaaaagctcaataagatgactgtagaactcatgaatctaaaagaattgggttctttcgatttggaaaacgtcaacgtgtatcctggagtatggaatacatacgatatcttcggtatcgaggccgctcgtgaatacttgtgcgaagccatgttaaacacctatggagaagggttcgattatctgtatcagccttgtgatcttctcgctagtttactatgtgctagttacgaaccagaatcagtgaataaattcaagttcggcgcagctagtactcttaagagagctacgttcggagacaataaagcattgttaaacgcggctcttcataaaaagtcagaacctattaacgataatagtagctgccacttttttagcaaggtccctaatataggaactggatattacaaatactttatcgacttgggtcttctcatgagaatggaaaggaaactatctgataagatatcttctcaaaagatcaaggaaatggaagaaacagaagacttttaattcttatcaataacatatttttctatgatctgtcttttaaacgatggattttccacaaatgcgcctctcaagtccctcatagaatgatacacgtataaaaaatatagcataggcgatgactccttatttttagacattagatatgccaaaatcatagccccgcttctatttactcccgcagcacaatgaaccaacacgggctcgtttcgttgatcacatttagataaaaaggcggttacgtcgtcaaaatatttactaatatcggtagttgtatcatctaccaacggtatatgaataatattaatattagagttaggtaatgtatatttatccatcgtcaaatttaaaacatatttgaacttaacttcagatgatggtgcatccatagcatttttataatttcccaaatacacattattggttacccttgtcattatagtgggagatttggctctgtgcatatctccagttgaacgtagtagtaagtatttatacaaacttttcttatccatttataacgtacaaatggataaaactactttatcggtaaacgcgtgtaatttagaatacgttagagaaaaggctatagtaggcgtacaagcagccaaaacatcaacacttatattctttgttattatattggcaattagtgcgctattactctggtttcagacgtctgataatccagtctttaatgaattaacgagatatatgcgaattaaaaatacggttaacgattggaaatcattaacggatagcaaaacaaaattagaaagtgatagaggtagacttctagccgctggtaaggatgatatattcgacttcaaatgtgtggatttcggcgcctattttatagctatgcgattggataagaaaacatatctgccgcaagctattaggcgaggtactggagacgcgtggatggttaaaaaggcggcaaaggtcgatccatctgctcaacaattttgtcagtatttgataaaacacaagtctaataatgttattacttgtggtaatgagatgttaaatgaattaggttatagcggttattttatgtcaccgcattggtgttccgattttagtaatatggaatagtgttagataaatgcggtaacgaatgttcctgtaaggaaccataacagcttagatttaacgttaaagatgagcataaacataataaacaaaattacaatcaaacttataacattaatatcaaacaatccaaaaaatgaaatcagtggagtagtaaacgcgtacataactcctggataacgtttagcagctgccgttcctattctagaccaaaaattcggtttcatgttttcgaaacggtattctgcaacaagtcgaggatcgtgttctacatatttggcggcgttatccagtatctgcctattgatcttcatttcgttttcgattctggctatttcaaaataaaatcccgatgatagacctccagactttataatttcatctacgatgttcagcgccgtagtaactttaataatataggctgataagctaacatcataccctcctgtatatgtgaatatggcatgatttttgtccattacaagctcggttttaactttattgcctgtaataatttctctcatctgtaggatatctatttttttgtcatgcattgccttcaagacgggacgaagaaacgtaatatcctcaataacgttatcgttttctacaataactacatattctacctttttattttctaactcagtaaaaaaattagaatcccatagggctaaatgtctagcgatatttcttttcgtttcctctgtacacatagtgttacaaaaccctgaaaagaagtgagtatacttgtcatcatttctaatgtttcctccagtccactgtataaacgcataatccttgtaatgatctggatcatccttgactaccacaacatttcttttttctggcataacttcgttgtcctttacatcatcgaacttctgatcattaatatgctcatgaacattaggaaatgtttctgatggaggtctatcaataactggcacaacaataacaggagttttcaccgccgccatttagttattgaaattaatcatatacaactctttaatacgagttatattttcgtctatccattgtttcacattgacatatttcgacaaaaagatataaaatgcgtattccaatgcttctctgtttaatgaattactaaaatatacaaacacgtcactgtctggcaataaatgatatcttagaatattgtaacaatttattttgtattgcacatgttcgtgatctatgagttcttcttcgaatggcataggatctccgaatctgaaaacgtataaataggagttagaataataatatttgagagtattggtaatatataaactctttagcggtataattagtttttttctctcaatttctatttttagatgtgatggaaaaatgactaattttgtagcattagtatcatgaactctaatcaaaatcttaatatcttcgtcacacgttagctctttgaagtttttaagagatgcatcagttggttctacagatggagtaggtgcaacaattttttgttctacacatgtatgtactggagccattgttttaactataatggtgcttgtatcgaaaaactttaatgcagatagcggaagctcttcgccgcgactttctacgtcgtaattgggttctaacgccgatctctgaatggatactagttttctaagttctaatgtgattctctgaaaatgtaaatccaattcctccggcattatagatgtgtatacatcggtaaataaaactatagtatccaacgatcccttctcgcaaattctagtcttaaccaaaaaatcgtatataaccacggagatggcgtatttaagagtggattcttctaccgttttgttcttggatgtcatataggaaactataaagtccgcactactgttaagaatgattactaacgcaactatatagtttaaattaagcattttggaaacataaaataactctgtagacgatacttgactttcgaataagtttgcagacaaacgaagaaagaacagacctctcttaatttcagaagaaaactttttttcgtattcctgacgtctagagtttatatcaataagaaagttaagaattagtcggttaatgttgtatttcattacccaagtttgagatttcataatattatcaaaagacatgataatattaaagataaagcgctgactatgaacgaaatagctatatggttcgctcaagaatatagtcttgttaaacgtggaaacgataactgtatttttaatcacgtcagcggcatctaaattaaatataggtatatttattccacacactctacaatatgccacaccatcttcataataaataaattcgttagcaaaattattaattttagtgaaatagttagcgtcaactttcatagcttccttcaatctaatttgatgctcacacggtgcgaattccactctaacatcccttttccatgcctcaggttcatcgatctctataatatctagttttttgcgtttcacaaacacaggctcgtctctcgcgatgagatctgtatagtaactatgtaaatgataactagatagaaagatgtagctatatagatgacgatcctttaagagaggtataataactttaccccaatcagatagactgttgttatggtcttcggaaaaagaatttttataaatttttccagtattttccaaatatacgtacttaacatctaaaaaatccttaatgataataggaatggataatccgtctattttataaagaaatacatatcgcacattatacttttttttggaaatgggaataccgatgtgtctacataaatatgcaaagtctaaatattttttagagaatcttagttggtccaaattcttttccaagtacggtaatagatttttcatattgaacggtatcttcttaatctctggttctagttccgcattaaatgatgaaactaagtcactatttttataactaacgattacatcacctctaacatcatcatttaccagaatactgatcttcttttgtcgtaaatacatgtctaatgtgttaaaaaaaagatcatacaagttatacgtcatttcatctgtggtattcttgtcattgaaggataaactcgtactaatctcttctttaacagcctgttcaaatttatatcctatatacgaaaaaatagcaaccagtgtttgatcatccgcgtcaatattctgttctatcgtagtgtataacaatcgtatatcttcttctgtgatagtcgatacgttataaaggttgataacgaaaatatttttatttcgtgaaataaagtcatcgtaggattttggacttatattcgcgtctagtagatatgcttttatttttggaatgatctcaattagaatagtctctttagagtccatttaaagttacaaacaactaggaaattggtttatgatgtataatttttttagtttttatagattctttattctatacttaaaaaatgaaaataaatacaaaggttcttgagggttgtgttaaattgaaagcgagaaataatcataaattatttcattatcgcgatatccgttaagtttgtatcgtaatggcgtggtcaattacgaataaagcggatactagtagcttcacaaagatggctgaaatcagagctcatctaaaaaatagcgctgaaaataaagataaaaacgaggatattttcccggaagatgtaataattccatctactaagcccaaaaccaaacgagccactactcctcgtaaaccagcggctactaaaagatcaaccaaaaaggaggaagtggaagaagaagtagttatagaggaatatcatcaaacaactgaaaaaaattctccatctcctggagtcagcgacattgtagaaagcgtggctgctgtagagctcgatgatagcgacggggatgatgaacctatggtacaagttgaagctggtaaagtaaatcatagtgctagaagcgatctctctgacctaaaggtggctaccgacaatatcgttaaagatcttaagaaaattattactagaatctctgcagtatcgacggttctagaggatgttcaagcagctggtatctctagacaatttacttctatgactaaagctattacaacactatctgatctagtcaccgagggaaaatctaaagttgttcgtaaaaaagttaaaacttgtaagaagtaaatgcgtgcacttttttataaagatggtaaactctttaccgataataattttttaaatcctgtatcagacgataatccagcgtatgaggttttgcaacatgttaaaattcctactcatttaacagatgtagtagtatatgaacaaacgtgggaggaggcgttaactagattaatttttgtgggaagcgattcaaaaggacgtagacaatacttttacggaaaaatgcatgtacagaatcgcaacgctaaaagagatcgtatttttgttagagtatataacgttatgaaacgaattaattgttttataaacaaaaatataaagaaatcgtccacagattccaattatcagttggcggtttttatgttaatggaaactatgttttttattagatttggtaaaatgaaatatcttaaggagaatgaaacagtagggttattaacactaaaaaataaacacatagaaataagtcccgatgaaatagttatcaagtttgtaggaaaggacaaagtttcacatgaatttgttgttcataagtctaatagactatataaaccgctattgaaactgacggatgattctagtcccgaagaatttctgttcaacaaactaagtgaacgaaaggtatacgaatgtatcaaacagtttggtattagaatcaaggatctccgaacgtatggagtcaattatacgtttttatataatttttggacaaatgtaaagtccatatctcctcttccgtcaccaaaaaagttaatagcgttaactatcaaacaaactgctgaagtggtaggtcatactccatcaatttcaaaaagagcttatatggcaacgactattttagaaatggtaaaggataaaaattttttagatgtagtatctaaaactacgttcgatgaattcctatctatagtcgtagatcacgttaaatcatctacggatggatgatatagatctttacacaaataattacaagaccgataaatggaaatggataagcgtatgaaatctctcgcaatgacagctttcttcggagagctaagcacattagatattatggcattgataatgtctatatttaaacgccatccaaacaataccattttttcagtggataaggatggtcagtttatgattgatttcgaatacgataattataaggcttctcaatatttggatctgaccctcactccgatatctggagatgaatgcaagactcacgcatcgagtatagccgaacaattggcgtgtgtggatattattaaagaggatattagcgaatatatcaaaactactccccgtcttaaacgatttataaaaaaataccgcaatagatcagatactcgcatcagtcgagatacagaaaagcttaaaatagctctagctaaaggcatagattacgaatatataaaagacgcttgttaataagtaaatgaaaaaaaactagtcgtttataataaaacacgatatggatgccaacgtagtatcatcttctactattgcgacgtatatagacgctttagcgaagaatgcttcagaattagaacagaggtctaccgcatacgaaataaataatgaattggaactagtatttattaagccgccattgattactttgacaaatgtagtgaatatctctacgattcaggaatcgtttattcgatttaccgttactaataaggaaggtgttaaaattagaactaagattccattatctaaggtacatggtctagatgtaaaaaatgtacagttagtagatgctatagataacatagtttgggaaaagaaatcattagtgacggaaaatcgtcttcacaaagaatgcttgttgagactatcgacagaggaacgtcatatatttttggattacaagaaatatggatcctctatccgactagaattagtcaatcttattcaagcaaaaacaaaaaactttacgatagactttaagctaaaatattttctaggatccggtgcccaatctaaaagttctttgttgcacgctattaatcatccaaagtcaaggcctaatacatctctggaaatagaattcacacctagagacaatgaaacagttccatatgatgaactaataaaggaattgacgactctctcgcgtcatatatttatggcttctccagagaatgtaattctttctccgcctattaacgcgcctataaaaacctttatgttgcctaaacaagatatagtaggtttggatctggaaaatctatatgccgtaactaagactgacggcattcctataactatcagagttacatcaaacgggttgtattgttattttacacatcttggttatattattagatatcctgttaagagaataatagattccgaagtagtagtctttggtgaggcagttaaggataagaactggaccgtatatctcattaagctaatagagcccgtgaatgctatcagtgatagactagaagaaagtaagtatgttgaatctaaactagtggatatttgtgatcggatagtattcaagtcaaagaaatacgaaggtccgtttactacaactagtgaagtcgtcgatatgttatctacatatttaccaaagcaaccagaaggtgttattctgttctattcaaagggacctaaatctaacattgattttaaaattaaaaaggaaaatactatagaccaaactgcaaatgtagtatttaggtacatgtccagtgaaccaattatctttggagaatcgtctatctttgtagagtataagaaatttagcaacgataaaggctttcctaaagaatatggttctggtaagattgtgttatataacggcgttaattatctaaataatatctattgtttggaatatattaatacacataatgaagtgggtattaagtccgtggttgtacctattaagtttatagcagaattcttagttaatggagaaatacttaaacctagaattgataaaaccatgaaatatattaactcagaagattattatggaaatcaacataatatcatagtcgaacatttaagagatcaaagcatcaaaataggagatatctttaacgaggataaactatcggatgtgggacatcaatacgccaataatgataaatttagattaaatccagaagttagttattttacgaataaacgaactagaggaccgttgggaattttatcaaactacgtcaagactcttcttatttctatgtattgttccaaaacatttttagacgattccaacaaacgaaaggtattggcgattgattttggaaacggtgctgacctggaaaaatacttttatggagagattgcgttattggtagcgacggatccggatgctgatgctatagctagaggaaatgaaagatacaacaaattaaactctggaattaaaaccaagtactacaaatttgactacattcaggaaactattcgatccgatacatttgtctctagtgtcagagaagtattctattttggaaagtttaatatcatcgactggcagtttgctatccattattcttttcatccgagacattatgctaccgtcatgaataacttatccgaactaactgcttctggaggcaaggtattaatcactaccatggacggagacaaattatcaaaattaacagataaaaagacttttataattcataagaatttacctagtagcgaaaactatatgtctgtagaaaaaatagctgatgatagaatagtggtatataatccatcaacaatgtctactccaatgactgaatacattatcaaaaagaacgatatagtcagagtgtttaacgaatacggatttgttcttgtagataacgttgatttcgctacaattatagaacgaagtaaaaagtttattaatggcgcatctacaatggaagatagaccgtctacaaaaaactttttcgaactaaatagaggagccattaaatgtgaaggtttagatgtcgaagacttacttagttactatgttgtttatgtcttttctaagcggtaaataataatatggtatgggttctgatatccccgttctaaatgcattaaataattccaatagagcgatttttgttcctataggaccttccaactgtggatactctgtattgttaatagatatattaatacttttgtcgggtaacagaggttctacgtcttctaaaaataaaagttttataacatctggcctgttcataaataaaaacttggcgattctatatatactcttattatcaaatctagccattgtcttatagatgtgagctactgtaggtgtaccatttgattttctttctaatactatatatttctctcgaagaagttcttgcacatcatctgggaataaaatactactgttgagtaaatcagttattttttttatatcgatattgatggacatttttatagttaaggataataagtatcccaaagtcgataacgacgataacgaagtatttatacttttaggaaatcacaatgactttatcagattaaaattaacaaaattaaaggagcatgtatttttttctgaatatattgtgactccagatacatatggatctttatgcgtcgaattaaatgggtctagttttcagcacggtggtagatatatagaggtggaggaatttatagatgctggaagacaagttagatggtgttctacatccaatcatatatctaaagatatacccgaagatatgcacactgataaatttgtcatttatgatatatacacttttgacgctttcaagaataaacgattggtattcgtacaggtacctccgtcgttaggagatgatagtcatttgactaatccgttattgtctccgtattatcgtaattcagtagccagacaaatggtcaataatatgatttttaatcaagattcatttttaaaatatttattagaacatctgattagaagccactatagagtttctaaacatataacaatagttagatacaaggataccgaagaattaaatctaacgagaatatgttataatagagataagtttaaggcgtttgtattcgcttggtttaacggcgtttcggaaaatgaaaaggtactagatacgtataaaaaggtatctaatttgatataatgaattcagtgactgtatcacacgcgccatatactattacttatcacgatgattgggaaccagtaatgagtcaattggtagagttttataacgaagtagccagttggctgctacgagacgagacgtcgcctattcctgataagttctttatacagttgaaacaaccgcttagaaataaacgagtatgtgtgtgcggtatagatccgtatccgaaagatggaactggtgtaccgttcgaatcaccaaattttacaaaaaaatcaattaaggagatagcttcatctatatctagattaaccggagtaattgattataaaggttataaccttaatataatagacggggttataccctggaattattacttaagttgtaaattaggagaaacaaaaagtcacgcgatctactgggataagatttccaagttactgctgcagcatataactaaacacgttagtgttctttattgtttgggtaaaacagatttctcgaatatacgggcaaagttagaatccccggtaactaccatagtcggatatcatccagcggctagagaccgccaattcgagaaagatagatcatttgaaattatcaacgttttactggaattagacaacaaggcacctataaattgggctcaagggtttatttattaatgctttagtgaaattttaacttgtgttctaaatggatgcggctattagaggtaatgatgttatctttgttcttaagactataggtgtcccgtcagcgtgcagacaaaatgaagatccaagatttgtagaagcatttaaatgcgacgagttagaaagatatattgagaataatccagaatgtacactattcgaaagtcttagggatgaggaagcatactctatagtcagaattttcatggatgtagatttagacgcgtgtctagacgaaatagattatttaacggctattcaagattttattatcgaggtgtcaaactgtgtagctagattcgcgtttacagaatgcggtgccattcatgaaaatgtaataaaatccatgagatctaatttttcattgactaagtctacaaatagagataaaacaagttttcatattatctttttagacacgtataccactatggatacattgatagctatgaaacgaacactattagaattaagtagatcatctgaaaatccactaacaagatcgatagacactgccgtatataggagaaaaacaactcttcgggttgtaggtactaggaaaaatccaaattgcgacactattcatgtaatgcaaccaccgcatgataatatagaagattacctattcacttacgtggatatgaacaacaatagttattacttttctctacaacaacgattggaggatttagttcctgataagttatgggaaccagggtttatttcattcgaagacgctataaaaagagtttcaaaaatattcattaattctataataaactttaatgatctcgatgaaaataattttacaacggtaccactggtcatagattacgtaacaccttgtgcattatgtaaaaaacgatcgcataaacatccgcatcaactatcgttggaaaatggtgctattagaatttacaaaactggtaatccacatagttgtaaagttaaaattgttccgttggatggtaataaactgtttaatattgcacaaagaattttagacactaactctgttttattaaccgaacgaggagaccatatagtttggattaataattcatggaaatttaacagcgaagaacccttgataacaaaactaattttgtcaataagacatcaactacctaaggaatattcaagcgaattactctgtccaagaaaacgaaagactgtagaagctaacatacgagacatgttagtagattcagtggagaccgatacctatccggataaacttccgtttaaaaatggtgtattggacctggtagacggaatgttttactctggagatgatgctaaaaaatatacgtgtactgtatcaaccggatttaaatttgacgatacaaagttcgtcgaagacagtccagaaatggaagagttaatgaatatcattaacgatatccaaccattaacggatgaaaataagaaaaatagagagctatatgaaaaaacattatctagttgtttatgtggtgctaccaaaggatgtttaacattcttttttggagaaactgcaactggaaagtcgacaaccaaacgtttgttaaagtctgctatcggtgacctgtttgttgagacgggtcaaacaattttaacagatgtattggataaaggacctaatccatttatcgctaacatgcatttgaaaagatctgtattctgtagcgaactacctgattttgcctgtagtggatcaaagaaaattagatctgacaatattaaaaagttgacagaaccttgtgtcattggaagaccgtgtttctccaataaaattaataatagaaaccatgcgacaatcattatcgatactaattacaaacctgtttttgataggatagataacgcattaatgagaagaattgccgtcgtgcgattcagaacacacttttctcaaccttctggtagagaggctgctgaaaataatgacgcgtacgataaagtcaaactattagacgaggggttagatggtaaaatacaaaataatagatatagattcgcatttctatacttgttggtgaaatggtacagaaaatatcatgttcctattatgaaactatatcctacaccggaagagattcctgactttgcattctatctcaaaataggtactctgttagtatctagctctgtaaagcatattccattaatgacggacctctccaaaaagggatatatattgtacgataatgtggttactcttccgttgactactttccaacagaaaatatccaagtattttaattctagactatttggacacgatatagagagcttcatcaatagacataagaaatttgccaatgttagtgatgaatatctgcaatatatattcatagaggatatttcatctccgtaaatatatgctcatatatttatagaagatatcacatatctaaatgaataccggaatcatagatttatttgataatcatgttgatagtataccaactatattacctcatcagttagctactctagattatctagttagaactatcatagatgagaacagaagcgtgttattgttccatattatgggatcaggtaaaacaataatcgctttgttgttcgccttggtagcttccagatttaaaaaggtttacattctagtgccgaacatcaacatcttaaaaattttcaattataatatgggtgtagctatgaacttgtttaatgacgaattcatagctgagaatatctttattcattccacaacaagtttttattctcttaattataacgataacgtcattaattataacggattatctcgctacaataactctatttttatcgttgatgaggcacataatatctttgggaataatactggagaacttatgaccgtgataaaaaataaaaacaagattccttttttactattgtctggatctcccattactaacacacctaatactctgggtcatattatagatttaatgtccgaagagacgatagattttggtgaaattattagtcgtggtaagaaagtaattcagacacttcttaacgaacgcggtgtgaatgtacttaaggatttgcttaaaggaagaatatcatattacgaaatgcctgataaagatctaccaacgataagatatcacggacgtaagtttctagatactagagtagtatattgtcacatgtctaaacttcaagagagagattatatgattactagacgacagctatgttatcatgaaatgtttgataaaaatatgtataacgtgtcaatggcagtattgggacaacttaatctgatgaataatttagatactttatttcaggaacaggataaggaattgtacccaaatctgaaaataaataatggcgtgttatacggagaagaattggtaacgttaaacattagttccaaatttaaatactttattaatcggatacagacactcaacggaaaacattttatatacttttctaattctacatatggcggattggtaattaaatatatcatgctcagtaatggatattctgaatataatggttctcagggaactaatccacatatgataaacggcaaaccaaaaacatttgctatcgttactagtaaaatgaaatcgtctttagaggatctattagatgtgtataattctcctgaaaacgatgatggtagtcaattgatgtttttgttttcatcaaacattatgtccgaatcctatactctaaaagaggtaaggcatatttggtttatgactatcccagatactttttctcaatacaaccaaattcttggacgatctattagaaaattctcttacgccgatatttctgaaccagttaatgtatatcttttagccgccgtatattccgatttcaatgacgaagtgacgtcattaaacgattacacacaggatgaattaattaatgttttaccatttgacatcaaaaagctgttgtatctaaaatttaagacgaaagaaacgaatagaatatactctattcttcaagagatgtctgaaacgtattctcttccaccacatccatcaattgtaaaagttttattgggagaattggtcagacaatttttttataataattctcgtattaagtataacgataccaagttacttaaaatggttacatcagttataaaaaataaagaagacgctaggaattacatagatgatattgtaaacggtcacttctttgtatcgaataaagtatttgataaatctcttttatacaaatacgaaaacgatattattacagtaccgtttagactttcctacgaaccatttgtttggggagttaactttcgtaaagaatataacgtggtatcttctccataaaactgatgagatatataaagaaataaatgtcgagctttgttaccaatggatacctttccgttacattggaaccacacgagctgacgttagacataaaaactaatattaggaatgccgtatataagacgtatctccatagagaaattagtggtaaaatggccaagaaaatagaaattcgtgaagacgtggaattacctctcggcgaaatagttaataattctgtagttataaacgttccgtgtgtaataacctacgcgtattatcacgttggggatatagtcagaggaacattaaacatcgaagatgaatcaaatgtaactattcaatgtggagatttaatctgtaaactaagtagagattcgggtactgtatcatttagcgattcaaagtactgcttttttcgaaatggtaatgcgtatgacaatggcagcgaagtcactgccgttctaatggaggctcaacaaggtatcgaatctagttttgtttttcttgcgaatatcgtcgattcataaaaaagagaatagcggtaagtataaacacgaatactatggcaataattgcgaatgttttattctcttcgatatatttttgataatatgaaaaacatgtctctctcaaatcggacaaccatctcataaaatagttctcgcgcgctggagaggtagttgccgctcgtataatctctccagaataatatacttgcgtgtcgtcgttcaatttatacggatttctatagttctctgttatataatgcggttttccatcatgattagacgacgacaatagtgttctaaatttagatagttgatcagaatgaatgtttattggcgttggaaaaattatccatacagcgtctgcagagtggttgatagttgttcctagatatgtaaaataatccaacttactaggcagcaaattgtctagataaaatactgaatcaaacggtgcagacgtattggcggatctaatggaatccaattgattaactatcttttgaaaatatacatttttatgatccaatacttgtaagaatatagaaataatgataagtccatcatcgtgtttttttgcctcttcataagaactatattttttcttattccaatgaacaagattaatctctccagagtatttgtacacatctatcaagtgattggatccataatcgtcttcctttccccaatatatatgtagtgatgataacacatattcattggggagaaaccctccacttatatatcctcctttaaaattaatccttactagttttccagtgttctggatagtggttggtttcgactcattataatgtatgtctaacggcttcaatcgcgcgttagaaattgcttttttagtttctatattaataggagatagttgttgcggcatagtaaaaatgaaatgataactgtttaaaaatagctcttagtatgggaattacaatggatgaggaagtgatatttgaaactcctagagaattaatatctattaaacgaataaaagatattccaagatcaaaagacacgcatgtgtttgctgcgtgtataacaagtgacggatatccgttaataggagctagaagaacttcattcgcgttccaggcgatattatctcaacaaaattcagattctatctttagagtatccactaaactattacggtttatgtactacaatgaactaagagaaatctttagacggttgagaaaaggttctatcaacaatatcgatcctcactttgaagagttaatattattgggtggtaaactagataaaaaggaatctattaaagattgtttaagaagagaattaaaagaggaaagtgatgaacgtataacagtaaaagaatttggaaatgtaattctaaaacttacaacacgggataaattatttaataaagtatatataagttattgcatggcgtgttttattaatcaatcgttggaggatttatcgcatactagtatttacaatgtagaaattagaaagattaaatcattaaatgattgtattaacgacgataaatacgaatatctgtcttatatttataatatgctagttaatagtaaatgaacttttacagatctagtataattagtcagattattaagtataatagacgactagctaagtctattatttgcgaggatgactctcaaattattacactcacggcattcgttaaccaatgcctatggtgtcataaacgagtatccgtgtccgctattttattaactactgataacaaaatattagtatgtaacagacgagatagttttctctattctgaaataattagaactagaaacatgtttagaaagaaacgattatttctgaattattccaattatttgaacaaacaggaaagaagtatactatcgtcatttttttctctagatccagctactactgataatgatagaatagacgctatttatccgggtggcatacccaaaaggggtgagaatgttccagagtgtttatccagggaaattaaagaagaagttaatatagacaattcttttgtattcatagacactcggttttttattcatggcatcatagaagataccattattaataaattttttgaggtaatcttctttgtcggaagaatatctctaacgagtgatcaaatcattgatacatttaaaagtaatcatgaaatcaaggatctaatatttttagatccgaattcaggtaatggactccaatacgaaattgcaaaatatgctctagatactgcaaaacttaaatgttacggccatagaggatgttattatgaatcattaaaaaaattaactgaggatgattgattaaaaaatataaattaatttaccatcgtgtatttttataacgggattgtccggcatatcatgtagatagttaccgtctacatcgtatactcgaccatctacgcctttaaatcctctatttattgacattaatctattagaattggaataccaaatattagtaccctcaattagtttattggtaatattttttttagacgatagatcgatggctcttgaaaccaaggttttccaaccggactcattgtcgatcggtgagaagtctttttcattagcatgaatccattctaatgatgtatgtttaaacactctaaacaattggacaaattcttttgatttgctttgaatgatttcaaataggtcttcgtctacagtaggcataccattagataatctagccattataaagtgcacgtttacatatctacgttctggaggagtaagaacgtgactattgagacgaatggctcttcctactatctgacgaagagacgcctcgttccatgtcatatctaaaatgaagatatcattaattgagaaaaaactaataccctcgcctccactagaagagaatacgcatgttttaatgcattctccgttagtgtttgattcttggttaaactcagccaccgccttgattctagtatcttttgttctagatgagaactctatattagagataccaaagactttgaaatatagtaataagatttctattcctgactgattaacaaatggttcaaagactagacatttaccatgggatgctaatattcccaaacatacatctataaatttgacgcttttctcttttaattcagtaaatagagagatatcagccgcactagcatcccctttcaatagttctccctttttaaaggtatctaatgcggatttagaaaactctctatctcttaatgaatttttaaaatcattatatagtgttgctatctcttgcgcgtattcgcccggatcacgattttgtctttcaggaaagctatcgaacgtaaacgtagtagccatacgtctcagaattctaaatgatgatatacctgtttttatttcagcgagtttagccttttgataaatttcttcttgctttttcgacatattaacgtatcgcattaatactgttttcttagcgaatgatgcagacccttctacgtcatcaaaaatagaaaactcgttattaactatatacgaacatagtcctcctagtttggagactaattctttttcatcgactagacgtttattctcaaatagtgattggtgttgtaaggatcctggtcgtagtaagttaaccaacatggtgaattcttgcacactattgacgataggtgtagccgataaacaaatcatcttatggttttttaacgcaatggtcttagataaaaaattatatactgaacgagtaggacggatcttaccatcttctttgattaatgatttagaaatgaagttatgacattcatcaatgatgacgcatattctactcttggaattaatagttttgatattagtaaaaaatttatttctaaaattttgatcatcgtaattaataaaaatacaatccttcgttatctctggagcgtatctgagtatagtgttcatccaaggatcttctatcaaagcctttttcaccaataagataatagcccaattcgtataaatatccttaagatgtttgagaatatatacagtagtcattgttttaccgacacccgtttcatggaacaataaaagagaatgcatactgtctaatcctaagaaaactcttgctacaaaatgttgataatccttgaggcgtactacgtccgaccccatcatttcaacgggcatattagtagttctgcgtaaggcataatcgatataggccgcgtgtgatttactcatttatgagtgataagtaataactatgttttaaaaatcacagcagtagtttaactagtcttctctgatgtttgttttcgatactttttgaatcagaagtcatactagaataaagcaacgagtgaacgtaatagagagcttcgtatactctattcgaaaactctaagaacttattaatgaattccgtatccactggattgtttaaaatactaaattgaacactgttcacatccttccaagaagaagacttagtgacggacttaacatgagacataaataaatccaaattttttttacaaacatcactagccaccataatggcgctatctttcaaccagctatcgcttacgcattttagcagtctaacatttttaaagagactacaatatattctcatagtatcgattacacctctaccgaataaagttggaagtttaataatacaatatttttcgtttacaaaatcaaataatggtcgaaacacgtcgaaggttaacatcttataatcgctaatgtatagattgttttcagtgagatgattattagatttaatagcatctcgttcacgtttgaacagtttattgcgtgcgctgaggtcggcaactacggcgtccgctttagtactcctcccataatactttacgctattaatctttaaaatttcatagactttatctagatcgctttctggtaacatgatatcatgtgtaaaaagttttaacatgtcggtcggcattctatttagatcattaactctagaaatctgaagaaagtaattagctccgtattccagactaggtaatgggcttttacctagagacagattaagttctggcaatgtttcataaaatggaagaaggacatgcgttccctcccggatattttttacaatttcatccatttacaactctatagtttgttttcattattattagttattatctcccataatcttggtaatacttaccccttgatcgtaagataccttatacaggtcattacatacaactaccaattgtttttgtacataatagattggatggttgacatccatggtggaataaactactcgaacagatagtttatctttccccctagatacattagccgtaatagttgtcggcctaaagaatatctttggtgtaaagttaaaagttagggttcttgttccattattgctttttgtcagtagttcattataaattctcgagatgggtccgttctctgaatatagaacatcatttccaaatctaacttctagtctagaaataatatcggtcttattcttaaaatctattcccttgatgaagggatcgttaatgaacaaatccttggcctttgattcggctgatctattatctccgttatagacgttacgttgactagtccaaagacttacaggaatagatgtatcgatgatgttgatactatgtgatatgtgagcaaagattgttctcttagtggcatcactatatgttccagtaatggcggaaaactttttagaaatgttatatataaaagaattttttcgtgttccaaacattagcagattagtatgaagataaacactcatattatcaggaacattatcaatttttacatacacatcagcatcttgaatagaaacgataccatcttctggaacctctacgatctcggcagactccggataaccagtcggtgggccatcgctaacaataactagatcatccaacaatctactcacatatgcatctatataatctttttcatcttgtgagtaccctggatacgaaataaatttattatccgtatttccataataaggtttagtataaacagagagagatgttgccgcatgaacttcagttacagtcgccgttggttggtttatttgacctattactctcctaggtttctctataaacgatggtttaatttgtacattcttaaccatatatccaataaagctcaattcaggaacataaacaaattctttgttgaacgtttcaaagtcgaacgaagagtcacgaataacgatatcggatactggattgaaggttaccgttacggtaatttttgaatcggatagtttaagactgctgaatgtatcttccacatcaaacggagttttaatataaacgtatactgtagatggttctttaatagtgtcattaggagttaggccaatagaaatatcattaagttcactagaatatccagagtgtttcaaagcaattgtattattgatacaattattatataattcttcgccctcaatttcccaaataacaccgttacacgaagagatagatacgtgattaatacatttatatccaacatatggtacgtaactgaatcttcccatacctttaacttctggaagttccaaactcagaaccaaatgattaagcgcagtaatatactgatccctaatttcgaagctagcgatagcctgattgtctggaccatcgtttgtcataactccggatagagaaatatattgcggcatatacaaagttggaatttgactatcgactgcgaagacattagaccgtttaatagagtcatccccaccgatcaaagaattaatgatagtattattcattttctatttaaaatggaaaaagcttacaataaactccgtagagaaatatctataatttgtgagttttccttaaagtaacagcttccgtaaacgccgtctttatctcttagtaggtttattgtatttatgaccttttccttatcttcatagaatactaaaggcaacaaagaaatttttggttcttctctaagagctacgtgagacttaaccatagacgccaacgaatccctacatattttagaacagaaatacccaacttcaccacccttgaatgtctcaatactaataggtttaaaaaccaaatcttgattacaaaaccaacacttatcaattacactatttgtcttaatagacacatctgccatagatttataatactttggtagtatacaagcgagtgcttcttctttagcgggcttaaagactgctttaggtgctgaaataaccacatctggaaggcttactcgcttagccatttaattacggaactatttttttatacttctaatgagcaagtagaaaacctctcatctacaaaaacgtactcgtgtccataatcctctaccatagttacacgttttttagatctcatatgtgctaaaaagttttcccatactaattggttactattatttttcgtataatttttaacagtttgaggttttagatttttagttacagaagtgatatcgaatattttatccaaaaagaatgaataattaattgtcttagaaggagtgttttcttggcaaaagaataccaagtgcttaaatatttctactacttcattaatcttttctgtactcagattcagtttctcatcttttacttgattgattatttcaaagactaacttataatcctttttatttattctctcgttagccttaagaaaactagatacaaaatttgcatctacatcatccgtggatatttgatttttttccatgatatccaagagttccgagataatttctccagaacattgatgagacaataatctccgcaatacatttctcaaatgaataagtttattagacacatggaagtttgactttttttgtacctttgtacatttttgaaataccgactcgcaaaaaatacaatattcatatccttgttcagatactataccgttatgtctacaaccgctacataatcgtagattcatgttaacactctacgtatctcgtcgtccaatattttatataaaaacattttatttctagacgttgccagaaaatcctgtaatatttttagttttttgggctgtgaataaagtatcgccctaatattgttaccgtcttccgccaatatagtagttaaattatccgcacatgcagaagaacaccgcttaggcggattcagtacaatgttatatttttcgtaccaactcatttaaatatcataatctaaaatagttctgtaatatgtctagcgctaatatattgatcataatcctgtgcataaattaagatacaacaatgtctcgaaatcatcgacatggcttcttccatagttagaagatcgtcgtcaaagttagcaacgtgattcatcaacatttgctgttttgaggcagcaaatactgaaccgtcgccattcaaccattcataaaaaccatcgtctgaatccattgataatttcttgtactggtttttgagagctcgcatcaatctagcatttctagctcccggattgaaaacagaaagaggatcgtacatccagggtccattttctgtaaatagaatcgtataatgtcccttcaagaagatatcagacgatccacaatcaaagaattggtctccgagtttgtaacaaactgcggactttaacctatacatgataccgtttagcataatttctggtgatacgtcaatcggagtatcatctattagagatctaaagccggtgtaacattctccaccaaacatattcttattctgacgtcgttctacataaaacatcattgctccattaacgataacaggggaatgaacagcactacccatcacattagttcccaatggatcaatgtgtgtaactccagaacatcttccatagcctatgttaggaggagcgaacaccactcttccactattgccatcgaatgccatagaataaatatccttggaattgatagaaatcggactgtcggatgttgtgatcatcttcataggattaacaactatgtatggtgccgcctgaagtttcatatcgtaactgatgccgtttataggtctagccacagaaaccaacgtaggtctaaatccaactatagacaaaatagaagccaatatctgttcctcatctgtcataacttgagagcatccagtatgaataatcttcattagatggggatctaccgcatcatcatcgttacaataaaaaattcccattctaatgttcataattgcttttctaatcatggtatgcatgtttgctctctgaatctctgtggaaattagatctgatacacctgtaatcactatcggattatcctccgtaagacgattaaccaacaacatataattataagactttacttttctaaattcataaagttgctggattaggctataggtgtctccatgtacatacgcgttctcgagcgcaggaagtttaataccgaatagtgccatcagaataggatgaatatagtaattagtttctggttttctataaataaaagacaaatcttgtgaactagacatatcggtaaaatgcatggattggaatcgtgtagtcgacagaagaatatgatgattagatggagagtatattttatctaactctttgagttggtcaccgattctaggactagctcgagaatgaataagtactaaaggatgagtacatttcacagaaacactagcattgttcaatgtgctctttacatgggtaaggagttgaaatagctcgtttctatttgttctgacaatatttagtttattcataatgttaagcatatcctgaatagtaaagttagatgtgtcatacttgttagtagttagatatttagcaattgcattcccatcatttctcaatctcgtactccaatcatgtgtagatgctacttcatctatagaaaccatacaatcctttttgataggctgttgagattgattatttcctgcacgtttaggtttggtacgttgatttctagcccctgcggatataaagtcatcgtctacaatttgggacaatgaattgcatacactacaagacaaagatttatcagaagtgtgaatatgatcttcatctaccaaagaaagagtttgattagtataactagattttagtcctgcgttagatgttaaaaaaacatcgctattgaccacggcttccattatttatattcgtagtttttactcgaaagcgtgattttaatatccaatcttattacttttggaatcgttcaaaacctttgactaattgtagaatttgatctattgccctacgcgtatactcccttgcatcatatacgttcgtcaccagatcgtttgtttcggcctgaagttggtgcatatctttttcaacactcgacatgagatccttaagggccatatcgtctagattttgttgagatgctgctcctggatttggattttgttgtgctgttgtacatactgtaccaccagtaggtgtaggagtacatacagtggccacaataggaggttgaggaggtgtaaccgttggagtagtacaagaaatacttccatccgattgttgtgtacatgtagttgttggtaacgtctgagaaggttgggtagatggcggtgtcgtcgtcttttgatctttattaaatttagagataatatcctgaacagcattgctcggcgtcaacgctggaaggagtgaactcgccggcgcatcagtatcttcagacagccaatcaaaaagattagacatatcagatgatgtattagtttgttgtcgtggttttggtgtaggagcagtactactaggtagaagaataggagccgatgtagctgttggaaccggctgtggagttatatgaatagttggttgtagcggttggataggctgtctgctggcggccatcatattatctctagctagttgttctcgcaactgtctttgataatacgactcttgagactttagtcctatttcaatcgcttcatcctttttcgtatccggatccttttcttcagaataatagattgacgactttggtgtagaggattctgccagcctctgtgagaacttgttaaagaagtccatttaaggctttaaaattgaattgcgattataagattaaatggcagacacagacgatattatcgactatgaatccgatgatctcaccgaatacgaggatgatgaagaagaggaagaagatggagagtcactagaaactagtgatatagatcccaaatcttcttataagattgtagaatcagcatccactcatatagaagatgcgcattccaatcttaaacatatagggaatcatatatctgctcttaaacgacgctatactagacgtataagtctatttgaaatagcgggtataatagcagaaagctataacttgcttcaacgaggaagattacctctagtttcagaattttctgacgaaacgatgaagcaaaatatgctacatgtaattatacaagagatagaggagggttcttgtcctatagtcatcgaaaagaacggagaattgttgtcggtaaacgattttgacaaagatggtctaaaattccatctagactatattatcaaaatttggaaacttcaaaaacgatattagaatttatacgaatatcgttctctaaatgtcacaatcaagtctcgcatgttcagcaatttattgtcgtactttatatcgtgttcattaacgatatcttgcaaaatagtaatgattctatcttccttcgatagatattcttcagagattattgtcttatattctttcttgttatcagatatgaatttgataagactttgaacattattgatacccgtctgtttaattttttctacagatattttagttttggcagattctatcgtatctgtcaatagacatccaacatcgacattcgacgtcaattgtctataaatcaacgtataaattttagaaataacattagcgaattgttgtgcattgatgtcgttattctgaaacagtatgattttaggtagcattttcttaacaaagagaacgtatttattgttactcagttgaacagatgatatatccagattactaacgcatctgattccgtataccaaactttcagaagaaatggtgtacaattgtttgtattcattcaatgtctctttttcagaaattagtttagagtcgaatactgcaataattttcaagagatagttttcatcagataagattttatttagtgtagatatgataaaactattgttttgttggagaacttgatacgccgcgttctctgtagtcgacgctctcaaatgggaaacaatctccattatttttttggaatcggatactatatcttcggtatcttgacgcagtctagtatacatagagttaagagagattagagtttgtacattaagcaacatgtctctaaatgtggctacaaacttttcctttttcacatcatctagtttattatataccgatttcacaacggcaccagatttaaggaaccagaatgaaaaactctgataactacaatatttcatcatagttacgattttatcatcttctatagttggtgtaatagcgcatacctttttctccaagactggaaccaacgtcataaaaatgtttaaatcaaaatccatatcaacatctgatgcgctaagaccagtctcgcgttcaagattatctttactaatggtgacgaactcatcgtatagaactctaagtttgtccattatttatttacagatttagttgtttaatttatttgtgctcttccagagttgggatagtatttttctaacgtcggtattatattattaggatctacgttcatatgtatcataatattaatcatccacgttttgataaatctatctttagcttctgaaataacgtatttaaacaaaggagaaaaatatttagctacggcatcagacgcaataacattttttgtaaatgtaacgtatttagacgacagatcttcgttaaaaagttttccatctatgtagaatccatcggttgttaacaccattcccgcgtcagattgaataggagtttgaatagtttgttttggaaatagatccttcaataacttatagttgggtgggaaaaaatcgattttatcactagactctttcttttttactatcattacctcatgaactatttcttgaatgagtatatgtattttctttcctatatcggacgcgttcattggaaaatataccatgtcgttaactataagaatatttttatcctcgtttacaaactgaataatatcagatgtagttcgtaaacgaactatatcatcaccagcacaacatctaactatatgatatccactagtttcctttagccgtttattatcttgttccatattagcagtcattccatcatttaagaaggcgtcaaaaataatagggagaaatgacattttggattctgttacaactttaccaaaattaaggatatacggacttactatctttttctcaacgtcgatttgatgaacacacgatgaaaatgtgcttctatgagattgatcatgtagaaaacaacaagggatacaatattttcgcatatcatgaaatatattaagaaatcccaccttattatatttccccaaaggatccatgcacgtaaacattatgccgttatcattaataaagacttctttctcatcggatctgtaaaagttgttactgatttttttcattccaggatctagataattaataatgatgggttttctattcttattctttgtattttggcatatcctagaccagtaaacagtttccactttggtaaaatcagcagacttttgaacgctattaaacatggcattaatggcaataactaaaaatgtaaaatatttttctatgttaggaatatggtttttcactttaatagatatatggtttttggccaaaatgatagatatttttttatccgaggatagtaaaatattattagtcgccgtctctataaaaatgaagctagtctcgatatccaattttattctagaattgataggagtcgccaaatgtaccttatacgttatatctcccttgatgcgttccatttgtgtatctatatcggacacaagatctgtaaatagttttacgttattaatcatcacggtatcgccgtcgctagataacgctaatgtaccatccaagtcccaaatggagagatttaactgttcatcgtttagaataaaatgattaccggtcatattaataaagtgttcatcgtatctagataacaacgacttataattaatgtccaagtcttgaactcgctgaatgatcttttttaacccagttagttttagattggtacgaaatatattgttaaactttgattctacagtaatgtccaaatctagttgtggaaatacttccatcaacattgtttcaaacttgataatattattatctacatcttcgtacgatccaaattccggaatagatgtatcgcacgctcttgccacccagataaccaaaaagtcacacgctccaggatatacattgtataaaaagctatcgttttttagtagtgtttttttctgcgtgtatacgaagggattaaaaatagtattatcaacgtaactatattccaaattattcttatgagaatagataataatatcgtccttaatatctaacaaatttcctaaatatccctttaattgagtcattcgaagcgtcaatagaatatgtctcttaactatttccggctgttgtatatttaaatgacttcgtaaaaaataatatatgggcgacttctcatctatgtaatcatatggagtgagatatagggctcgttctacctcctgccccttacccacctgtaataccaattgcggacttactatatatcgcatatttatatcgtggggtaaagtgaaaatctactaccgatgatgtaagtcttacaatgttcgaaccagtaccagatcttaatttggaggcctccgtagaactaggggaggtaaatatagatcaaacaacacctatgataaaggaaaatagcggttttatatcccgcagtagacgtctattcgcccatagatctaaggatgatgagagaaaactagcactacgattctttttacaaagactttattttttagatcatagagagattcattatttgttcagatgcgttgacgctgtaaaagacgtcactattaccaaaaaaaataacattatcgtggcgccttatatagcacttttaactatcgcatcaaaaggatgcaaacttacagaaacaatgattgaagcattctttccagaactatataatgaacatagtaagaaatttaaattcaactctcaagtatccatcatccaagaaaaactcggataccagtttggaaactatcacgtttatgattttgaaccgtattactctacagtagctctggctattcgagatgaacattcatctggcatttttaatatccgtcaagagagttatctggtaagttcattatctgaaataacatatagattttatctaattaatctaaaatctgatcttgttcaatggagtgctagtacgggcgctgtaattaatcaaatggtaaatactgtattgattacagtgtatgaaaagttacaactggtcatagaaaatgattcacaatttacatgttcattggctgtggaatcaaaacttccaataaaattacttaaagatagaaatgaattatttacaaaattcattaacgagttaaaaaagaccagttcattcaagataagcaaacgcgataaggatacgctattaaaatattttacttaggactggagttagaatttatagacgactcatttcgtttatcattgttactattattactattactatcattattagtgttggcattattagtattcttcttgtcatcttgttcagaaatatacagcaatgctatacctaatactaaatacattatcatgctcgcaatggctctaacaacaacgaaccaaaatgaatttggtcgtagcttttgttcacaaaaatacataaagaaatgtctacataaatctatggcgccattggctacttgaaatagcgccagtcctcctacagattttaatatagctgtataacatgacatttattcatcatcaaaagagacagagtcaccatctgtcatatttagattttttttcatgtgttcaaagtatcctctactcatttcattataatagtttatcatacttagaattttaggacggatcaatgagtaagacttgactagatcgtcagtagtaatttgtgcatcgtctattctgcatccgcttcgtcgaataatgtatagcatcgctttgagattctccatagctatcaagtctttatacaatgacatggaaatatctgtgaatactttatacttctccaacatcgatgccttaacatcatcgcctactttagcattgaaaatacgttctattgtgtagatggatgtagcaagatttttaaacaacaatgccatcttacacgatgattgcctcaagtctccaatcgtttgtttagaacgattagctacagagtccaatgcttggctgactagcatattattatctttagaaattgtattcttcaatgaggcgtttatcatatctgtgatttcgttagtcatattacagtctgactgggttgtaatgttatccaacatatcacctatggatacggtacacgtaccagcatttgtaataatcctatctaagatgttgtatggcattgcgcagaaaatatcttctcctgtaatatctccactctcgataaatctactcagattattcttaaatgccttattctctggagaaaagatatcagtgtccatcatttcattaatagtatacgcagaaaagataccacgagtatcaattctatccaagatacttatcggttccgagtcacagataatggtttcctctccttcgggagatcctgcatagaaatatctaggacaatagtttctatactgtctgtaactctgataatctctaaagtcactaactgataccatgaaattgagaagatcaaacgctgaagtaattaatttttctgcctcgtttttactacaactagttttcatcaatgtagtgacgatgtattgtttagttacttttggtctaatactgatgatagagatattattgcttcccataatggatcttctagtagtcaccttaaagcccattgatgcgaatagcagatagataaagtcttggtatgactcctttctaatatagtacggactacctttgtcacccaactttatacccacataagccataacaacctctttaatagccgtttcatgaggtttatcagccatgagcctgagtagttggaagaatctcatgaatcccgtctcagaaagtcctatatgcatgatagatttatctttcctgggaaactctcgtatagtcatagatgaaatactctttaaagtttctgaaataagattagtaacagtcttacctccgactactctaggtaacaaacaaactctaataggtgttttctctgcggagataatatcagaaaggatagagcaataagtagtattattgtgattataaagaccgaatacataacaggtagaatttataaacatcatgtcctgaaggtttttagacttgtattcctcgtaatccataccgtcccaaaacatggatttggtaactttgatagccgtagatctttgttccttcgccaacaggttaaagaaattaataaagaatttgttgtttctatttatgtccacaaattgcacgtttggaagcgccacggttacattcactgcagcattttgaggatcgcgagtatgaagtacgatgttattgtttactggtatatctggaaagaaatctaccagtctaggaataagagattgatatcgcatagaaatagtaaagtttataatctcatcatcgaagagcattttgttaccattgtaataaatatccactctgtcatatgtataaatgaagtactgttcaaacatgatgagatgtttatatgttggcatagtagtgagatcgacgtttggtaatggcaatgtattaagattaactccataatgtctagcagcatctgcgatgttataagcgtcgtcaaagcggggtcgatcttgtattgttatatattgtctaacacctataagattatcaaaatcttgtctgcttaatacaccgttaacaatttttgccttgaattcttttattggtgcattaataacatccttatagaggatgttaaacaaataagtgttatcaaagttaagatctggatatttcttttctgctagaacatccattgagtcggagccatctggtttaatataaccaccgataaatctagctctgtattctgtatccgtcaatctaatattaagaaggtgttgagtgaaaggtggaagatcgtaaaagctgtgagtattaatgataggattagtttccgaactaatgttaattggggtattaataatatctatatttccagcgttaagtgtaacattaaacagttttaattcacgtgacgtggtatcaattaaataattaatgcccaatttggatatagcagcctgaagctcatcttgtttagttacggatcctaatgagttattaagcaatatatcgaacggatgaacgaaggttgttttaagttggtcacatactttgtaatctagacatagatgcggaagaacggtagaaactatacgaaataaatattcagagtcctctaattgatcaagagtaactattgacttaataggcatcatttatttagtattaaatgacgaccgtaccagtgacggatatacaaaacgatttaattacagagttttcagaagataattatccatctaacaaaaattatgaaataactcttcgtcaaatgtctattctaactcacgttaacaacgtggtagatagagaacataatgccgccgtagtgtcatctccagaggaaatatcctcacaacttaatgaagatctatttccagatgatgattcaccggccactattatcgaacgagtacaacctcatactactattattgacgatactccacctcctacgtttcgtagagagttattgatatcggaacaacgtcaacaacgagaaaaaagatttaatattacagtatcgaaaaatgctgaagcaataatggaatctagatctatgataacttctatgccaacacaaacaccatccttgggagtagtttatgataaagataaaagaattcagatgttagaggatgaagtggttaatcttagaaatcaacgatctaatacaaaatcatctgataatttagataattttaccaaaatactatttggtaagactccgtataaatcaacagaagttaataagcgtatagccatcgttaattatgcaaatttgaacgggtctcccttatcagtcgaggacttggatgtttgttcggaggatgaaatagatagaatctataaaacgattaaacaatatcacgaaagtagaaaacgaaaaattatcgtcactaacgtgattattattgtcataaacattatcgagcaggcattgctaaaactcggatttgaagaaatcaaaggactgagtaccgatatcacttcagaaattatcgatgtggagatcggagatgactgcgatgctgtagcatcaaaactaggaatcggtaacagtccggttcttaatattgtattgtttatactcaagatattcgttaaacgaattaaaattatttaatttaatacattcccatatccagacaacaatcgtctggattaatctgttcctgtcgtctcataccggacgacatattaatctttttattagtgggcatctttttagatggtttctttttcccagcattaactgattcgatacctagaagatcgtgattgatctctccgaccattccacgaacttctaattggccgtctctgacggtaccataaactattttaccagcattagtaacagcttggacaatctgaccatccatcgcattgtacgatgtagtagtaactgttgttctacgtctaggagcaccagaagtatttttggagcccttggaggctgatgtagaagaagacgaggattttgattttggtttacatgtaatacattttgaactctttgattttgtatcacatgcgccggcagtcacatctgtttgagaattaagattattgttgcctcctttgacggctgcatctccaccgatttgcgctagtagatttttaagctgtggtgtaatcttattaactgtttcgatataatcatcgtaactgcttctaacggctaaattttttttatccgccatttagaagctaaaaatatttttatttatgcagaagatttaactagattatacaatgaactaatatgatccttttccagattatttacaaacttggtattttttggttctggaggaggcgaatttaaattcggacttggattcggattttgtaagttcttgatcttattatacatcgagtataggatggcgacagtaactgctacacaaataccgatcaaaagaagaataccaatcatttattgacaataacttcactattgatcaagtatgcaatatatcatcttttcactaaataagtagtaataatgattcaacaatgtcgagatatatggacgataataatttagttcatggaaatatcgctatgattggtgtgaatgactccgctaactctgtggggtgcgcagtgctttccccacatagaataaattagcattccgactgtgataataataccaagtataaacgccataatactcaatactttccatgtacgagtgggactggtagacttactaaagtcaataaaggcgaagatacacgaaagaatcaaaagaatgattccagcgattagcacgccggaaaaataatttccaatcataagcatcatgtccatttaactaataaaaattttaaatcgccgaatgaacaaagtggaatataaaccatataaaaacaatagtttgtactgcaaaaataatatctatttttgttttcgaagatatggtaaaattaaatagtagtacacagcatgttataactaacagcagcaacggctcgtaattacttatcatttactagacgaaaaggtggtgggatattttcttgctcaaataatacgaatatatcacccatccattttatgcgatgtttatatactctaatctttaatagatctatagacgacgggtttaccaacaatatagattttatcgattcatctaatttaaacccttccttaaacgtgaatgatctattatctggcataacgatgaccctacctgatgaatcggacaatgtactgggccatgtagaataaattatcaacgaattatcgtctacgaacatttatatcatttgttttaattttaggacgcgaataaatggatataaaatagaaaataacagatattacaaccagtgttatggccgcgcccaaccaggtaggcagttttattttatcttttactacaggttctcctggatgtacgtcaccaacggcggacgtagttctagtacaattagacgtaagttccgcttgggaattttttaacgctaaagagttaacgttaatcgtgcacccaacgtatttacatctagttcgttgaacatcttgattataatataaccattttctatctctagattcgtcagtgcactcatgtaaccaacataccctaggtcctaaatatttatctccggaattagattttggataattcgcgcaccaacaatttctatttcctttatgatcgttacaaaagacgtataatgccgtatccccaaaagtaaaataatcaggacgaataattctaataaactcagaacaatatctcgcatccatatgtttggagcaaatatcggaataagtagacatagccggtttccgttttgcacgtaaccattctaaacaattggggtttccaggatcgtttctacaaaatccagtcatgaaatcgtcacaatgttctgtcttgtaattattattaaatatttttggacagtgtttggtatttgtcttagaacaacattttgccacgctatcactatcgcccaggagataatccttttttataaaatgacatcgttgcccggatgctatataatcagtagcgtgttttaaatccttaatatattcaggagttacctcgttctgataatagattaatgatccaggacgaaatttgaaagaactacatggttctccatgaattaatacatattgtttagcaaattcaggaactataaaactactacaatgatctatcgacataccatctatcaaacaaaacttgggtttaatttctcccggagatgtttcataatagtacgtataactttcttctgcaaacttaacagctctattatattcaggataattaaaacctaattccatatatttgtctcgtatatctgctattcctggtgctattttgattctattaagagtaacagctgcccccattcttaataatcgtcagtatttaaactgttaaatgttggtatatcaacatctaccttatttcccgcagtataaggtttgttgcaggtatactgttcaggaatggttacatttatacttcttctatagtcctgtctttcgatgttcatcacatatgcaaagaacagaataaacaaaataatgtaagaaataatattaaatatctgtgaattcgtaaatacattgattgccataataattacagcagctacaatacacacaatagacattcccacagtgttgccattacctccacgatacatttgagttactaagcaataggtaataactaagctagtaagaggcaatagaaaagatgagataaatatcatcaatatagagattagaggagggctatatagagccaagacgaacaaaatcaaaccgagtaacgttctaacatcattatttttgaagattcccaaataatcattcattcctccataatcgttttgcatcatacctccatctttaggcataaacgattgctgctgttcctctgtaaataaatctttatcaagcactccagcacccgcagagaagtcgtcaagcatattgtaatatcttaaataactcatttatatattaaaaaatgtcactattaaagatggagtataatctttatgccgaactaaaaaaaatgacttgtggtcaacccctaagtctttttaacgaagacggggatttcgtagaagttgaaccgggatcatcctttaagtttctgatacctaagggattttacgcctctccttccgtaaagacgagtctagtattcgagacattaacaacgaccgataataaaatcactagtatcaatccaacaaatgcgccaaagttatatcctcttcaacgcaaagtcgtatctgaagtagtttctaatatgaggaaaatgatcgaatcaaaacgtcctctatacattactcttcacttggcgtgtggatttggtaagactattaccacgtgttatcttatggctacacacggtagaaaaaccgtcatttgcgtacccaataaaatgttaatacatcaatggaagacacaggtagaggcagtcggattggaacataagatatccatagatggagtaagtagtctattaaaggaactaaagactcaaagtccggatgtattaatagtagtcagtagacatctgacaaacgatgccttttgtaaatatatcaataagcattatgatttgttcatcttggatgaatcacatacgtataatctgatgaacaatacagcagttacaagatttttagcgtattatcctccgatgatgtgttattttttaactgctacacctagaccatctaaccgaatttattgtaacagtattattaatattgccaagttatccaatctaaaaaaaactatctatgcagtagatagtttttttgagccatattccacagataatattagacatatggtaaaacgactagatggaccatctaataaatatcatatatataccgagaagttattatctgtagacgagcctagaaatcaacttattcttgataccctggtagaagaattcaagtcaggaactattaatcgcattttagttattactaaactacgtgaacatatggtattattctacaaacgattattagattttttcggaccagaggttgtatttataggagacgcccaaaatagacgtactccagatatggtcaaatcaatcaaggaactaaatagatttatattcgtatccaccttattttattccggtactggtttagatattcctagtttggattcgttgttcatttgctcggcagtaatcaacaatatgcaaatagagcaattactagggagggtatgtcgagaaacagaactattagataggacggtatatgtatttcctaacacatccatcaaagaaataaagtacatgataggaaatttcatgcaacgaattattagtctgtctgtagataaactaggatttaaacaaaaaagttatcggaaacatcaagaatccgatcccacttctgcatgtacaacatcatccagagaagaacgtgtattaaatagaatatttaactcgcaaaatcgttaagaagtttaagcgacgatccgcatgctgcgcaggccagtgtattacccctcatagtattaatataatccaatgatacttttgtgatgtcggaaatcttaaccaatttagactgacaggcagaacacgtcatgcaatcatcatcgtcatcgataactgtagtcttgggcttctttttgcgactcttcattccggaacgcacattggtgctatccatttaggtagtaaaaaataagtcagaatatgccctataacacgatcgtgcaaaacctggtatatcgtctctatctttatcacaatatagtgtatcgacatttttattattattgacctcgtttatcttggaacatggaatgggaacatttttgttatcaacggccatctttgccttaattccagatgttgtaaaattataactaaacagtctatcatcgacacaaatgaaattcttgtttagacgtttgtagtttacgtatgcggctcgttcgcgtctcattttttcagatattgcaggtactataatattaaaaataagaatgaaataacataggattaaaaataaagttatcatgacttctagcgctgatttaactaacttaaaagaattacttagtctgtacaaaagtttgagattttcagattctgcggctatagaaaagtataattctttggtagaatggggaacatctacttactggaaaataggcgtgcaaaaggtagctaatgtcgagacgtcaatatctgattattatgatgaggtaaaaaataaaccgtttaatattgatccgggctattacattttcttaccggtatattttgggagcgtctttatttattcgaagggtaaaaatatggtagaacttggatctggaaactcttttcaaataccagatgatatgcgaagtgcgtgtaacaaagtattagacagcgataacggaatagactttctgagatttgttttgttaaacaatagatggataatggaagatgctatatcaaaatatcagtctccagttaatatatttaaactagctagtgagtacggattaaacatacccaaatatttagaaattgaaatagaggaagacacattatttgacgacgagttatactctattatagaacgctctttcgatgataaatttccaaaaatatccatatcgtatattaagttgggagaacttagacggcaagttgtagactttttcaaattctcattcatgtatattgagtccatcaaggtagatcgtataggagataatatttttattcctagcgttataacaaaatcaggaaaaaagatattagtaaaagatgtagaccatttaatacgatccaaggttagagaacatacatttgtaaaagtaaaaaagaaaaacacattttccattttatacgactatgatggaaacggaacagaaactagaggagaagtaataaaacgaattatagacactataggacgagactattatgttaacggaaagtatttctctaaggttggtagtgcaggcttaaagcaattgactaataaattagatattaatgagtgcgcaactgtcgatgagttagttgatgagattaataaatccggaactgtaaaacgaaaaataaaaaaccaatcagcatttgatttaagcagagaatgtttgggatatccagaagcggattttataacgttagttaataacatgcggttcaaaatagaaaattgtaaggttgtaaatttcaatattgaaaatactaattgtttaaataacccgagtattgaaactatatatggaaactttaaccagttcgtctcaatctttaatgtcgtcaccgatgtcaaaaaaagattattcgagtgaaataatatgcgcctttgatataggtgcaaaaaatcctgccagaactgttttagaagtcaaggataactccgttagggtattggatatatcaaaattagactggagttctgattgggaaaggcgcatagctaaagatttgtcacaatatgaatacactacagttcttctagaacgtcagcctagaaggtcgccgtatgttaaatttatctattttattaaaggctttttatatcatacatcggctgccaaagttatttgcgtctcgcctgtcatgtctggtaattcatatagagatcgaaaaaagagatcggtcgaagcatttcttgattggatggacacattcggattgcgagactccgttccggatagacgcaaattagacgatgtagcggatagtttcaatttggctatgagatacgtattagataaatggaatactaattatacaccttataataggtgtaaatctagaaattacataaaaaaaatgtaataacgttagtaacgccattatggataatctatttacctttctacatgaaatagaagatagatatgccagaactatttttaactttcatctaataagttgcgatgaaataggagatatatatggtcttatgaaagaacgcatttcctcagaggatatgtttgataatatagtgtataataaagatatacatcctgccattaagaaactagtgtattgcgacatccaacttactaaacacattattaatcagaatacgtatccggtatttaacgattcttcacaagtgaaatgttgtcattatttcgacataaactcagataatagcaatattagctctcgtacagtagagatatttgagagggaaaagtcatctcttgtatcatatattaaaactaccaataagaagagaaaggtcaattacggcgaaataaagaaaactgttcatggaggcactaatgcaaattacttttccggtaaaaagtctgacgagtatctgagtactacagttagatccaacattaatcaaccttggatcaaaaccatctctaagaggatgagagttgatatcattaatcactctatagtaacgcgtggaaaaagctctatattacaaactatagaaattatttttactaatagaacatgtgtgaaaatattcaaggattctactatgcacattattctatccaaggacaaggatgaaaaggggtgtatacacatgattgacaaattattctatgtctattataatttatttctgttgttcgaagatatcatccaaaacgagtactttaaagaagtagctaatgttgtaaaccacgtactcacggctacggcattagatgagaaattattcctaattaagaaaatggctgaacacgatgtttatggagttagcaatttcaaaatagggatgtttaacctgacatttattaagtcgttggatcataccgttttcccctctctgttagatgaggatagcaaaataaagttttttaaggggaaaaagctcaatattgtagcattacgatctctggaggattgtataaattacgtgactaaatccgagaatatgatagaaatgatgaaggaaagatcgactattttaaatagcatagatatagaaacggaatcggtagatcgtctaaaagaattgcttctaaaatgaaaaaaaacactaattcagaaatggatcaacgactagggtataagtttttggtgcctgatcctaaagccggagttttttatagaccgttacatttccaatatgtatcgtattctaattttatattgcatcgattgcatgaaatcttgaccgtcaagcggccaatcttatcgtttaagaataatacagaacgaattatgatagaaattagcaatgttaaagtgactcctccagattactcacctataatcgcgagtattaaaggtaagagttatgacgcattagccacgttcactgtaaatatctttaaagaggtaatgaccaaagagggtatatccatcactaaaataagtagttatgagggaaaagattctcatttgataaaaattccgctactaataggatacgggaataaaaatccacttgatacagccaagtatcttgttcctaatgtcataggtggagtctttatcaataaacaatctgtcgaaaaagtaggaattaatctagtagaaaagattacaacatggccaaaatttagggttgttaagccaaactcattcactttctcgttttcctccgtatcccctcctaatgtattaccgacaagatatcgccattacaagatatctctggatatatcacaattggaagcgttgaatatatcatcgacaaagacatttataacggtcaatattgttttgctgtctcaatatttatctagagtgagtctagaattcattagacgtagtttatcatacgatatgcctccagaagttgtctatctagtaaacgcgataatagatagtgctaaacgaattactgaatctattactgactttaatattgatacatacattaatgacctggtggaagctgaacacattaaacaaaaatctcagttaacgattaacgagttcaaatatgaaatgctgcataactttttacctcatatgaactatacacccgatcaactaaagggattttatatgatatctttactaagaaagtttctctactgtatcttccacacttctagatatccagatagagattcgatggtttgtcatcgcatcctaacgtacggcaaatattttgagacgttggcacatgatgaattagagaattacataggcaacatccgaaacgatatcatgaacaatcacaagaacagaggcacttacgcggtaaacattcatgtactaacaactcccggacttaatcacgcgttttctagcttattgagtggaaagttcaaaaagtcagacggtagttatcgaacacatcctcactattcatggatgcagaatatttctattcctaggagtgttggattttatccggatcaagtaaagatttcaaagatgttttctgtcagaaaataccatccaagtcaatatctttacttttgttcatcagacgttccggaaagaggtcctcaggtaggtttagtatctcaattgtctgtcttgagttccattacaaatatactaacgtctgagtatttggatttggaaaagaaaatttgtgagtatatcagatcatattataaagatgatataagttactttgaaacaggatttccaatcactatagaaaatgctctagtcgcatctcttaatccaaatatgatatgtgattttgtaactgactttagacgtagaaaacggatgggattcttcggtaacttggaggtaggtattactttagttagggatcacatgaatgaaattcgcattaatattggagcgggaagattagtcagaccattcttggttgtggataacggagagctcatgatggatgtgtgtccggagttagaaagcagattagacgacatgacattctctgacattcagaaagagtttccgcatgtcatcgaaatggtagatatagaacaatttacttttagtaacgtatgtgaatcggttcaaaaatttagaatgatgtcaaaggatgaaagaaagcaatacgatttatgtgactttcctgccgaatttagagatggatatgtagcatcttcactagtgggaatcaatcacaattctggacccagagctattcttggatgtgctcaagctaaacaagctatctcttgtctgagttcggatatacgaaataaaatagacaatggaattcatttgatgtatccagagaggccaatcgtgattagtaaggctttagaaacttcaaagattgcggctaattgcttcggccaacatgttactatagcattaatgtcgtacaaaggtatcaatcaagaggatggaattatcatcaaaaaacaatttattcagagaggcggtctcgatattgttacagccaagaaacatcaagtagaaattccattggaaaactttaataacaaagaaagagataggtctaacgcctattcaaaattagaaagtaatggattagttagactgaatgctttcttggaatccggagacgctatggcacgaaatatctcatcaagaactcttgaagatgattttgctagagataatcagattagcttcgatgtttccgagaaatataccgatatgtacaaatctcgcgttgaacgagtacaagtagaacttactgacaaagttaaggtacgagtattaaccatgaaagaaagaagacccattctaggagacaaatttaccactagaacgagtcaaaagggaacagtcgcgtatgtcgcggatgaaacggaacttccatacgacgaaaatggtatcacaccagatgtcattattaattctacatccatcttctctagaaaaactatatctatgttgatagaagttattttaacagccgcatattctgctaagccgtacaacaataagggagaaaaccgacctgtctgttttcctagtagtaacgaaacatccatcgatacatatatgcaattcgctaaacaatgttatgagcattcaaatccgaaattgtccgatgaagaattatcggataaaatcttttgtgaaaagattctctatgatcctgaaacggataagccttatgcatccaaagtattttttggaccaatttattacttgcgtctgaggcatttaactcaggacaaggcaaccgttagatgtagaggtaaaaagacgaagctcattagacaggcgaatgagggacgaaaacgtggaggaggtatcaagttcggagaaatggagagagactgtttaatagcgcatggtgcagccaatactattacagaagttttgaaagattcggaagaagattatcaagatgtgtatgtttgtgaaaattgtggagacatagcagcacaaatcaagggtattaatacatgtcttagatgttcaaaacttaatctctctcctctcttaacaaaaattgataccacgcacgtatctaaagtatttcttactcaaatgaacgccagaggcgtaaaagtcaaattagatttcgaacgaaggcctccttcgttttataaaccattagataaagttgatctcaagccgtcttttctggtgtaatattctagtttggtagtagatacatatcaatatcatcaaattcgagatccgaattataaaatgggcgtggattgttaactatagaatcggacgtctgatattcgaaaatctgtggagtttcaggttttggtgaaggtgtaactgctacttgggatactgaagtctgatattcagaaagctgtggatgttctggttcgacatccaccgatggtgtcacatcactaatcggttcggtaacgtctgtggatggaggtgctacttctacagaacctgtagcctcagttgtcaacggagatacatttttaatgcgagaaaatgtataatttggtaatggtttcttatgtggatctgaagaagaggtaagatatctactagaaagataccgatcacgttctagttctcttttgtagaacttaactttttctttctccgcatctagttgatattccaacctcttcacgttactacgttcagattccaattcacgttcgcatgggttacctccgcagtttttacgagcgatttcacgttcagccttcatgcgtctctccctctctctatcgagtttatcagagcagtctttctgaaggcgatcgaactccataaatttctccaacgctttgattgtttccatagatttccgaagttcagcttttaggactgtgattctttttctttcgaattcacagctggatgtacaaccgtttccattaccgccatctctaagtttcttttctagatcggcaacatttcatccccatgccttttacattcctcgagtctactgtcgtcgaaatatcgttccagctccttttcgacatcaataactttagcacgttgtctctcaagctctcttttgtagttatctgattccctggcacgtttaagatcttcatgcaattgagtcagctcttaacttcctctcttgcttcttcgtcatagtacgcgcaatcactgtgagatccattgttaccacgtctacactcggcgagctcgcgtttaagagattcaatttcccgtttgtattggtccatgtttccattgctaccaccattagatttacaggctgctagttgtcgttcgagatcagaaatacgggttttcttggaattgatttcgtcgatgtacttggcatcgaaacacttattaagttctttttccaattctacgattttatttctttcgcgagtcaattccctcctgtagtaactatctgttttgtcagattcacgctctctacgtagactttcttgcaagttactaatttgttccctagcacgtccgagtttagttttatatgctgaatagagttctgattcatcctttgagcagatctctagcgatcgtttaagattcctaattctagtctttagcctatttacctcctcagaagatgttccgttaccgttgcgtttacactcgttaagctgtctatcaagatccatgattctatctctaagacgttgcatctctctttccatatcagcattgctttcattattacgtctgcagtcactcaactgtctttcaatatctgagattctatctctaagacgtcgcatctctctctgtttcggcattggtttcattattacgtttacagtcgttcaactgtctttcaagatctgatattctagattggagtctgctaatctctgtagcattttcacggcattcactcagttgtctttcaagatctgaaattttagattggagtctgctaatctctgtaagatttcctcctccgctctcgatgcagtcggtcaacttattctctagttctctaatacgcgaacgcagtgcatcaacttcttgcgtgtcttcctggttgcgtgtacattcatcgagatctctaacgcgtcgtcgttcttcctcaagttctctgcgtactacagaaagcgtgtccttatcttgttgatatttagcaatttctgattctagagtactgattttgcttacgtagttactaatatttgtcttggccttatcaagatcctccttgtatttgtcgcattccttgatatccctacgaagtctggacagttcccattcgacattacgacgtttatcgatttcagctcggagatcgtcatcgcgttgttttagccacatacgactgagttcaagttctcgttgacaagatccatctacttttccattcctaatagtatccagttccttttctagttctgaacgcatttctcgttccctatcaagcgattctctcaattctcggatagtcttcttatcaatttctaataaatctgaaccatcatctgtcccattttgaatatccctgtgttctttgatctcttttgtaagtcggtcgattctttcggttttataaacagaatccctttccaaagtcctaatcttactgagtttatcactaagttctgcattcaattcggtgagttttctcttggcttcttccaactctgttttaaactctccactatttccgcattcttcctcgcatttatctaaccattcaattagtttattaataactagttggtaatcagcgattcctatagccgttcttgtaattgtgggaacataattaggatcttctaatggattgtatggcttgatagcatcatctttatcattattagggggatggacaaccttaattggttggtcctcatctcctccagtagcgtgtggttcttcaataccagtgttagtaataggcttaggcaaatgcttgtcgtacgcgggcacttcctcatccatcaagtatttataatcgggttctacttcagaatattcttttctaagagacgcgacttcgggagttagtagaagaactctgtttctgtatctatcaacgctggaatcaatactcaagttaaggatagcgaatacctcatcgtcatcatccgtatcttctgaaacaccatcatatgacatttcatgaagtctaacgtattgataaatagaatcagatttagtattaaacagatccttaacctttttagtaaacgcatatgtatattttagatctccagatttcataatatgatcacatgccttaaatgtcagtgcttccatgatataatctggaacactaatgggtgacgaaaaagatacagcaccatatgctacgttgataaataaatctgaaccactaagtagataatgattaatgttaagaaagaggaaatattcagtgtataggtatgtcttggcgtcatatcttgtactaaacacgctaaacagtttgttaatgtgatcaatttccaatagattaattagagcagcgggaataccaacaaacatattaccacatccgtattttctatgaatatcacatatcatgttaaaaaatcttgatagaagagcgaatatctcgtctgacttaatgagtcgtagttcagcagcaacataagtcataactgtaaatagaacatactttcctgtagtgttgattctagactccacatcaacaccattattaaaaatagttttatatacatctttaatctgctctccgttaatcgtcgaacgttctagtatacggaaacactttgatttcttatctgtagttaatgacttagtgatatcacgaagaatattacgaattacatttcttgtttttcttgagagacctgattcagaactcaactcatcgttccatagtttttctacctcagtggcgaaatctttggagtgcttggtacatttttcaataaggttcgtgacctccatttattataaaaaatttattcaaaacttaactacaatcgggtaattataaaatcgtagatctcccatgtggcggaatactaccatctatcgcatgtggatggacagtaggtaatggccatgggaacagtaatgtttgcatatttatctttcttgccagtattactgcatattgtcccaatgtttcgatgtgatgttctaacctatcaactgccgctgtatcacaacaatagtgtccgatgaaattaagattatgatccaatgtgtttaatatatgattatcaagtcttatacgatccgcgtcttttttgacaggatcaggttcttctacaggaagaagtttcggcctcttatgatattcatgtctgggaaacggtggtctagggtgaggctccggtatcggagtgggttttggattataatcatcatcgtctatgacatcatcttcgacttcgatatttattttgctatcttgatgatgtcctgtatcagttgcattttcagcactcgactgaatattagcgcattcattgtctattattaccatatttctaaacccaaaatgtatgtgttgaacatcagtactatcgttgatgagtcttatagcatgaattcgcttatcgttatcgggtttatcttctgtcaccttagcaattccttttttattaaactctacataatcatatccatttctattgtttgttctaatataaacgagtatagcatcattgctaaatttttcaatagtatcaaaaacagaatatcctaaaccatataatatatattcaggaacactcaaactaaatgtccaggattctcctaaatacgtaaactttaatagtgcgaaatcattcaaaaatctaccacttatagatagatagtacataaatgcgtatagtagtctacctatctctttattatgaaaaccggcattacgatcatatatgtcgtgatatacctgtgatccgtttacgttaaaccataaatacatgggtgatcctataaacatgaatttatttctaattctcagagctatagttaattgaccgtgtaatatttgcttacatgcatacttgatacgcttattaataagatttttatcattgctcgttatttcagaatcgtatatataaggagtaccatcgtgattcttaccagatattatacaaaatactatatataaaatatattgacccacgttagtaatcatataaatgtttaacgttttaaattttgtattcaatgatccattatcatacgctatcatggtcttgtaatattcattctttaaaatataatattgtgttagccattgcattggagctcctaatggagattttctattctcatccattttaggataggctttcataaagtccctaataacttcgtgaataatgtttctatgttttctactgatgcatgtatttgcttcgatttttttatcccatgtttcatctatcatagatttaaacgcagtaatgctcgcaacattaacatcttgaaccgttggtacaattccgttccataaatttataatgttcgccatttatataactcattttttgaatatacttttaattaacaaaagagttaagttactcatatggacgccgtccagtctgaacatcaatctttttagccagagatatcatagccgctcttagagtttcagcgtgattttccaacctaaatagaacttcatcgttgcgtttacaacacttttctatttgttcaaactttgttgttacattagtaatctttttttccaaattagttagccgttgtttgagagtttcctcattgtcgtcttcatcggctttaacaattgcttcgcgtttagcctctggctttttagcagcctttgtagaaaaaaattcagttgctggaattgcaagatcgtcatctccggggaaaagagttccgtccatttaaagtacagattttagaaactgacactctgcgttatttatatttggtacaacacatggattataaatattgatgttaataacatcagaaaatgtaaagtctatacattgttgcatcgtgttaaattttctaatggatctagtattattgggtccaacttctgcctgaaatccaaatatggaagcggatacaaaaccgtttcctggataaaccacacatctccacttttgctttacatcagaaattgtgtcgttgacatcttgaactctcctatctaatgccggtgttccacctatagattttgaatattcgaatgctgcatgagtagcattaaattccttaatattgccataattttcatatattgagtaaccctggataaaaagtaaacacaccgcagccgtcgctaccacaataaaaaaaattgatagagagttcatttataatctattagaagctgacaaaatttttttacacgcatcagacaatgctttaataaatagttcaacatctacttttgtcatatcgaaccgatggtatgattctaacctagaattacatccgaaaaagttgactatgttcatagtcattaagtcattaacaaacaacattccagactctggattataagacgatactgtttcgtcacaattacctaccttaatcatgtgattatgaatattggctattagagcaccttctaagaaatctataatatctttgaaacacgatttaaaatcaaaccacgaatatacttctacgaagaaagttagtttacccataggagaaataactataaatggagatctaaatacaaaatccggatctatgatagttttaacattattatattctctattaaatacctccacatctaaaaatgttaattttgaaactatgtcttcgtttattaccgtacctgaactaaacgctataagctctattgtttgagaactctttaaacgatattcttgaaatacatgtaacaaagtttcctttaactcggtcggtttatctaccatagttacagaatttgtatccttatctataatataataatcaaaatcgtataaagttatataattatcgcgttcagattgggatcttttcaaatagactaaaaaccccatttctctagtaagtatcttatgtatatgtttgtaaaatatcttcatggtgggaatatgctctaccacagttagccattcctcattgacagcggtagatgtattagacaaaactattccaatgtttaacaagggccattttacgagattattaaatccttgtttgataaatgtagccaatgagggttcgagttcaacgacgattgaattctcttcccgcggatgctgcatgatgaacgacgggatgttgttcgattgatttggaattctttttcgactttttgtttatattaaatattttaaaatttatagcggatagcaattcatgtaccacggataatgtagacgcgtattgcgcatcgatatctttattattagataaatttatcaataaatgtgagaagtttgcctcgttaaggtcttccatttaaatattatataaacatttgtgtttgtaacttattcgtcttttatggaatagttttttactagtaaagctgcaattacacactttgtccgtaaaacataaatataaacaccagcttttatcaatcgttccaaaaagtcgacggcggacatttttaacatggcatctattttaaatacacttaggtttttggaaaaaacatcattttataattgtaacgattcaataactaaagaaaagattaagattaaacataagggaatgtcatttgtattttataagccaaagcattctaccgttgttaaatacttgtctggaggaggtatatatcatgatgatttggttgtattggggaaggtaacaattaataatctaaagatgatgctattttacatggatttatcatatcatggagtgacaagtagtggagcaatttacaaattgggatcgtctatcgatagactttctctaaataggactattgttacaaaagttaataattatgatgatacattttttgacgacgatgattgatcgctattgcacaattttgtttttgtactttctaatatagtgtttaggttctttttcatatgagaatattgatttactaaaatatctatgtttaacttttgttctatgacgtccttatcggcggtatcggtacatatacgtaattcaccttcacaaaatacggagtcttcgataataatagccaatcgattattggatctagctgtctgtatcatattcaacatgtttaatatatcctttcgtttcccctttacaggcatcgatcgtagcatattttccgcgtctgatatggaaatgttaaaactacaaaaatgcgtaatgttagcccgtcctaatattggtacgtgtctataagtttggcatagtagaataatagacgtgtttaaatgccttccaaagtttaagaattctattagagtattgcattttgatagtttatcgcctacatcatcaaaaataagtaaaaagtgtgctgattttttatgattttgtgcgacagcaatacatttttctatgttacttttagttcgtatcagattatattctagagattcctgactactaacgaaattaatatgatttggccaaatgtatccatcataatctgggttataaacgggtgtaaacaagaatatatgtttatattttttaactagtgtagaaaacagagatagtaaatagatagtttttccagatccagatcctcccgttaaaaccattctaaacggcatttttaataaattttctcttgaaaattgtttttcttggaaacaattcataattatatttacagttactaaattaatttgataataaatcaaaatatggaaaactaaggttgttagtagggaggagaacaaagaaggcacatcgtgatataaataacatttattatcatgatgacaccagaaaacgacgaagagcagacatctgtgttctccgctactgtttacggagacaaaattcagggaaagaataaacgcaaacgcgtgattggtctatgtattagaatatctatggttatttcactactatctatgattaccatgtccgcgtttctcatagtgcgcctaaatcaatgcatgtctgctaacgaggctgctattactgacgccgctgttgccgttgctgctgcatcatctactcatagaaaggttgcgtctagcactacacaatatgatcacaaagaaagctgtaatggtttatattaccagggttcttgttatatattacattcagactaccagttattctcggatgctaaagcaaattgcactgcggaatcatcaacactacccaataaatccgatgtcttgactacctggctcattgattatgttgaggatacatggggatctgatggtaatccaattacaaaaactacatccgattatcaagattctgatgtatcacaagaagttagaaagtatttttgtgttaaaacaatgaactaatatttatttttgtacattaataaatgaaatcgcttaatagacaaactgtaagtaggtttaagaagttgtcggtgccggccgctataatgatgatactctcaaccattattagtggcataggaacatttctgcattacaaagaagaactgatgcctagtgcttgcgccaatggatggatacaatacgataaacattgttatttagatactaacattaaaatgtctacagataatgcggtttatcagtgtcgtaaattacgagctagattgcctagacctgatactagacatctgagagtattgtttagtattttttataaagattattgggtaagtttaaaaaagaccaatgataaatggttagatattaataatgataaagatatagatattagtaaattaacaaattttaaacaactaaacagtacgacggatgctgaagcgtgttatatatacaagtctggaaaactggttaaaacagtatgtaaaagtactcaatctgtactatgtgttaaaaaattctacaagtgacaacaaaaaatgaattaataataagtcgttaacgtacgccgccatggacgccgcgtttgttattactccaatgggtgtgttgactataacagatacattgtatgatgatctcgatatctcaatcatggactttataggaccatacattataggtaacataaaaactgtccaaatagatgtacgggatataaaatattccgacatgcaaaaatgctactttagctataagggtaaaatagttcctcaggattctaatgatttggctagattcaacatttatagcatttgtgccgcatacagatcaaaaaataccatcatcatagcatgcgactatgatatcatgttagatatagaagataaacatcagccattttatctattcccatctattgatgtttttaacgctacaatcatagaagcgtataacctgtatacagctggagattatcatctaatcatcaatccttcagataatctgaaaatgaaattgtcgtttaattcttcattctgcatatcagacggcaatggatggatcataattgatgggaaatgcaatagtaattttttatcataaaagttgtaaagtaaataataaaacaataaatattgaactagtagtacgtatattgagcaatcagaaatgatgctggtacctcttatcacggtgaccgtagttgcgggaacaatattagtatgttatatattatatatttgtaggaaaaagatacgtactgtctataatgacaataaaattatcatgacaaaattaaaaaagataaagagttctaattccagcaaatctagtaaatcaactgatagcgaatcagactgggaggatcactgtagtgctatggaacaaaacaatgacgtagataatatttctaggaatgagatattggacgatgatagcttcgctggtagtttaatatgggataacgaatccaatgttatggcgcctagcacagaacacatttacgatagtgttgctggaagcacgctgctaataaataatgatcgtaatgaacagactatttatcagaacactacagtagtaattaatgaaacggagactgttgaagtacttaatgaagataccaaacagaatcctaactattcatccaatcctttcgtaaattataataaaaccagtatttgtagcaagtcaaatccgtttattacagaacttaacaataaatttagtgagaataatccgtttagacgagcacatagcgatgattatcttaataagcaagaacaagatcatgaacacgatgatatagaatcatcggtcgtatcattggtgtgattagtttcctttttataaaattgaagtaatatttagtattattgctgccgtcacgttgtacaaatggagatattccctgtattcggcatttctaaaattagcaattttattgctaataatgactgtagatattatatagatacagaacatcaaaaaattatatctgatgagatcaatagacagatggatgaaacggtacttcttaccaacatcttaagcgtagaagttgtaaatgacaatgagatgtaccatcttattcctcatagattatcgacgattatactctgtattagttctgtcggaggatgtgttatctctatagataatgacatcaatggcaaaaatattctaacctttcccattgatcatgctgtaatcatatccccactgagtaaatgtgtcgtagttagcaagggtcctacaaccatattggttgttaaagcggatatacctagcaaacgattggtaacatcgtttacaaacgacatactatatgtaaacaatctgtcactgattaattatttgccgttgtctgtattcattattagacgagtcaccgactatttggatagacacatatgcgatcagatatttgctaataataagtggtattcccttataaccatcgacgataagcaatatcctattccatcaaactgtataggtatgtcctctgccaagtacataaattctagcatcgagcaagatactttaatccatgtttgtaacctcgagcatccgttcgactcagtatacaaaaaaatgcagtcgtacaattctctacctatcaaggaacaaatattgtacggtagaattgataatataaatatgagcattagtatttctgtggattaatagatttctagtatggggatcattaatcatctctaatctctaaatacctcataaaacgaaaaaaaagctattatcaaatactgtacggaatggattcattctcttctctttttatgaaactctgttgtatatctactgataaaactggaagcaaaaaatctgatagaaagaataagaataagatcaaggattatatggaacacgattattataaaataacaatagttcctggttcctcttccacgtctactagctcgtggtattatacacatgcctagtaatagtctctttgcgttgacggaaagcagactagaaataacaggctaaaatgttcagacaccataatagttcccaacccagataataacagagttccatcaacacattcctttaaactcaatcccaaacccaaaaccgttaaaatgtatccggccaattgatagtagataatgaggtgtacagcgcatgataatttacacagtaaccaaaatgaaaatactttagtaattataagaaatatagacggtaatgtcatcatcaacaatccgataatatgcctgagagtaaacattgacggataaaacaaaaatgctccgcataactctatcatggcaataacacaaccaaatacttgtaagattcctaaattagtagaaaatacaacgaatatcgatgtataagtgatctcgagaaataataagaataaagtaatgcccgtaaagataaacatcaacattgtttggtaatcattaaaccaattagtatgaagttgaactaatttcacagtagattttattccagtgttatcctcgcatgtataagtacctggtaagatatctttatattccataatcaatgagacatcactatctgataacgaatgaagtctagcactagtatgccatttacttaatatggtcgtcttggaagttttattataagttaaaatatcatggttatccaatttccatctaatatactttgtcggattatctatagtacacggaataatgatggtatcattacatgctgtatactctatggtctttgtagttgttataacaaccaacgtatagaggtatatcaacgatattctaactcttgacattttttatttatttaaaatgatacctttgttatttattttattctattttgctaacggtattgaatggcataagtttgaaacgagtgaagaaataatttctacttacttattagacgacgtattatacacgggtgttaatggggcggtatacacattttcaaataataaactaaacaaaactggtttaactaataataattatataacaacatctataaaagtagaggatgcggataaggatacattagtatgcggaaccaataacggaaatcccaaatgttggaaaatagacggttcagacgacccaaaacatagaggtagaggatacgctccttatcaaaatagcaaagtaacgataatcagtcacaacggatgtgtactatctgacataaacatatcaaaagaaggaattaaacgatggagaagatttgacggaccatgtggttatgatttatacacggcggataacgtaattccaaaagatggtttacgaggagcattcgtcgataaagacggtacttatgacaaagtttacattcttttcactgatactatcggctcaaagagaattgtcaaaattccgtatatagcacaaatgtgcctaaacgacgaaggtggtccatcatcattgtctagtcatagatggtcgacgtttctcaaagtcgaattagaatgtgatatcgacggaagaagttatagacaaattattcattctagaactataaaaacagataatgatacgatactatatgtattcttcgatagtccttattccaagtccgcattatgtacctattctatgaataccattaaacaatctttttctacgtcaaaattggaaggatatacaaagcaattgccgtctccagctcctggtatatgtttaccagctggaaaagttgttccacataccacgtttgaagtcatagaacaatataatgtactagatgatattataaagcctttatctaaccaacctatcttcgaaggaccgtctggtgttaaatggttcgatataaaggagaaggaaaatgaacatcgggaatatagaatatacttcataaaagaaaattctatatattcgttcgatacaaaatctaaacaaactcgtagctcgcaagtcgatgcgcgactattttcagtaatggtaactgcgaaaccgttatttatagcagatatagggataggagtaggaatgccacaaatgaaaaaaatacttaaaatgtaatcttaatcgagtacaccacacgacaatgaacaaacataagacagattatgctggttatgcttgctgcgtaatatgcggtctaattgtcggaattatttttacagcgacactattaaaagttgtagaacgtaaattagttcatacaccattaatagataaaacgataaaagatgcatatattagagaagattgtcctactgactggataagctataataataaatgtatccatttatctactgatcgaaaaacctgggaggaaggacgtaatgcatgcaaagctctaaattcaaattcggatctaattaagatagagactccaaacgagttaagttttttaagaagccttagacgaggctattgggtaggagaatccgaaatattaaaccagacaaccccatataattttatagctaagaatgccacgaagaatggaactaaaaaacggaaatatatttgtagcacaacgaatactcccaaactgcattcgtgttacactatataacaattacactacatttttatcataccactacttcggttagatgttttagaaaaaaataaatatcgccgtaccgttcttgtttttataaaaataacaattaacaattatcaaattttttctttaatattttacgtggttgaccattcttggtggtaaaataatctcttagtgttggaatggaatgctgtttaatgtttccacactcatcgtatattttgacgtatgtagtcacatcgtttacgcaatagtcagactgtagttctatcatgcttcctacatcagaaggaggaacagttttaaagtctcttggttttaatctattaccgttagttttcatgaaatcctttgttttatccacttcacattttaaataaatgtccactatacattcttttgttaattttactagatcgtcatgggtcatagaatttataggttccgtagtccatggatccaaactagcaaacttcgcgtatacggtatcgcgattagtgtatacaccaactgtatgaaaattaagaaaacagtttaataaatcaacagaaatatttaatcctccgtttgatacagatgcgccatatttatggatttcggattcacacgttgtttgtctgaggtgttcgtctagtgttgcttctacgtaaacttcgattcccatatattctttattgtcagaatcgcataccgatttatcatcatacactgtttgaaaactaaatggtatacacatcaaaataataaataataacgagtacattctgcaatattgttatcgtaattggaaaaatagtgttcgagtgagttggattatgtgagtattggattgtatattttattttatattttgtaataagaataaaatgctaatgtcaagtttattccaatagatgtcttattaaaaacatatataataaataacaatggctgaatggcataaaattatcgaggatatctcaaaaaataataagttcgaggatgccgccatcgttgattacaagactacaaagaatgttctagctgctattcctaacagaacatttgccaagattaatccgggtgaaattattcctctcatcactaatcgtaatattctaaaacctcttattggtcagaaatattgtattgtatatactaactctctaatggatgagaacacgtatgctatggagttgcttactgggtacgcccctgtatctccgatcgttatagcgagaactcataccgcacttatatttttgatgggtaagccaacaacatccagacgtgacgtgtatagaacgtgtagagatcacgctacccgtgtacgtgcaactggtaattaaaataaaaagtaatattcatatgtagtgtcaattttaaatgatgatgatgaaatggataatatccatattgacgatgtcaataatgccggtattggcatacagttcatcgatttttagatttcattcagaggatgtggaattatgttatgggcatttgtattttgataggatctataatgtagtaaatataaaatataatccgcatattccatatagatataattttattaatcgcacgttaaccgtagatgaactagacgataatgtcttttttacacatggttattttttaaaacacaaatatggttcacttaatcctagtttgattgtctcattatcaggaaacttaaaatataatgatatacaatgctcagtaaatgtatcgtgtctcattaaaaatttggcaacgagtacatctactatattaacatctaaacataagacttattctctacatcggtccacgtgtattactataataggatacgattctattatatggtataaagatataaatgacaagtataatgacatctatgattttactgcaatatgtatgctaatagcgtctacattgatagtgaccatatacgtgtttaaaaaaataaaaatgaactcttaattatgctatgctattagaaatggataaaatcaaaattacggttgattcaaaaattggtaatgttgttaccatatcgtataacttggaaaagataactattgatgtcacacctaaaaagaaaaaagaaaaggatgtattattagcgcaatcagttgctgtcgaagaggcaaaagatgtcaaggtagaagaaaaaaatattatcgatattgaagatgacgatgatatggatgtagaaagcgcgtaatactatctataaaaataagtatataataaatactttttatttacggtactcttgtagtggtgataccctactcgattatttttttaaaaaaatacttattctgattcttctaaccatttccgtgttcgtttgaatgccacatcgacgtcaaagataggggagtagttgaaatctagttctgcattgttggtacgcacctcaaatgtagtgttggatatcttcaacgtatagttgttgagtagtgatggttttctaaatagaattctcttcatatcattcttgcacgcgtacatttttagcatccatcttggaattctagatccttgttctattcccaatggtttcatcaatagaagattaaacatatcgtacgaacacgatggagagtaatcgtagcaaaagtaagcatttcctttaatctcagatcccggatactggatatattttgcagccaacacgtgcatccatgcaacatttcctacatatacccggctatgcaccgcgtcatcatcgactgtacgatacataatgttaccgtgttgcttacattgctcgtaaaagactttcgtcaatttgtctccttctccgtaaattctagtgggtcttaggcaacaagtatacaattttgctccattcatgattacggaattattggctttcataaccagttgctcggccatacgtttactttttgcgtatacatgtcctggtgatatatcataaagggtatgctcatggccgatgaatggatcaccgtgtttattgggtcctattgcttccatgctactagtatagatcaaatacttgattcctaggtccacacaagctgccaaaatagtctgtgttccataatagtttactttcatgatttcattatcggtgtattttccaaatacatccactagagcagccgtatgaataatcagatttaccccatctagcgcttctctcaccttatcaaagtcgtttatatcacattgtatatagtttataaccttaactttcgaggttattggttgtggatcttctacaatatctatgactctgatttcttgaacatcatctgcactaattaacagttttactatatacctgcctagaaatccggcaccaccagtaaccgcgtacacggccattgctgccactcataatatcagactacttattctattttactaaataatggctgtttgtataatagaccacgataatatcagaggagttatttactttgaaccagtccatggaaaagataaagttttaggatcagttattggattaaaatccggaacgtatagtttgataattcatcgttacggagatattagtcaaggatgtgattccataggcagtccagaaatatttatcggtaacatctttgtaaacagatatggtgtagcatatgtttatttagatacagatgtaaatatatctacaattattggaaaggcgttatctatttcaaaaaatgatcagagattagcgtgtggagttattggtatttcttacataaatgaaaagataatacattttcttacaattaacgagaatggcgtttgatatatcagttaatgcgtctaaaacaataaatgcattagtttacttttctactcagcaaaataaattagtcatacgtaatgaagttaatgatacacactacactgtcgaatttgatagggacaaagtagttgacacgtttatttcatataatagacataatgacaccatagaaataagaggggtgcttccagaggaaactaatattggttgcgcggttaatacgccggttagtatgacttacttgtataataagtatagttttaaactgattttagcagaatatataagacacagaaatactatatccggcaatatttattcggcattgatgacactagatgatttggctattaaacagtatggagacattgatctattatttaatgagaaacttaaagtagactccgattcgggactatttgactttgtcaactttgtaaaggatatgatatgttgtgattctagaatagtagtagctctatctagtctagtatctaaacattgggaattgacaaataaaaagtataggtgtatggcattagccgaacatatatctgatagtattccaatatctgagctatctagactacgatacaatctatgtaagtatctacgcggacacactgagagcatagaggatgaatttgattattttgaagacgatgattcgtctacatgttctgccgtaaccgacagggaaacggatgtataattttttttatagcgtgaaggatatgataaaaaatataattgttgtatttatcccattctaatcaccttatatgattctgtaacacaataaaggagtctcatagatgtatagaggtcagatactggtttgataaactgtttattccacataagtatgtttgactttatggttagacccgcatactttaacaaatcactgaaaattggagttaggtattgacctctcagaatcagttgccgttctggaacattaaatgtattttttatgatatactccaacgcatttatgtgggcatacaacaagtcattactaatggagtattccaagagttttagttgtctagtatttaacaagagaagagatttcaacagactgtttatgaactcgaatgccgcctcattgtcgcttatattgatgatgtcgaattctcccaatatcatcaccgatgagtagctcatcttgttatcgggatccaagttttctaaagatgtcattaaaccctcgatcatgaatggatttatcatcatcgtttttatgttggacatgagcttagtccgtttgtccacatctatagacgacgatttctgaattatttcatatatccctctctttaactccaggaacttgtcaggatggtctactttaatatgttctcgtctaagagatgaaaatctttggatggtcgcacgcgacttttctctaaaggatgatgttgcccaagatcctctcttaaatgaatccatcttatccttggacaagatggacagtctattttccttagatggtttaatatttttgttacccatgatctataaaggtagacctaatcgtctcggatgacctatatatttattttcagttttattatacgcataaattgtaaaaaatatgttaggtttacaaaaatgtctcgtggggcattaatcgtttttgaaggattggacaaatctggaaaaacaacacaatgtatgaacatcatggaatctataccggcaaacacgataaaatatcttaactttcctcagagatccactgtcactggaaagatgatagatgactatctaactcgtaaaaaaacctataatgatcatatagttaatctattattttgtgcaaatagatgggagtttgcatcttttatacaagaacaactagaacagggaattactttaatagttgatagatacgcattttctggagtagcgtatgccgccgctaaaggcgcgtcaatgactctcagtaagagttatgaatctggattgcctaaacccgacttagttatattcttggaatctggtagcaaagaaattaatagaaacgtcggcgaggaaatttatgaagatgttacattccaacaaaaggtattacaagaatataaaaaaatgattgaagaaggagatattcattggcaaattatttcttctgaattcgaggaagatgtaaagaaggagttgattaagaatatagttatagaggctatacacacggttactggaccagtggggcaactgtggatgtaatagtgaaattacattttttataaatagatgttagtacagtgttataaatggatgaagcatattactctggcaacttggaatcagtactcggatacgtgtccgatatgcataccgaactcgcatcaatatctcaattagttattgccaagatagaaactatagataatgatatattaaacaaggacattgtaaattttatcatgtgtagatcaaacttggataatccatttatctctttcctagatactgtatatactattatagatcaagagaactatcagactgagttgattaattcattagacgacaatgaaattatcgattgtatagttaataagtttatgagcttttataaggataacctagaaaatatagtagatgctatcattactctaaaatatataatgaataatccagattttaaaactacgtatgcagaagtactcggttccagaatagccgatatagatattaaacaagtgatacgtaagaatatactacaattgtctaatgatatccgcgaacgatatttgtgaaaaatattaaaaaaaaatactttttttattaaatgacgtcgcttcgcgaatttagaaaattatgctgtgatatatatcacgcatcaggatataaagaaaaatctaaattaattagagactttataacagatagggatgataaatatttgatcattaagctattgcttcccggattagacgatagaatttataacatgaacgataaacaaattataaaattatatagtataatatttaaacaatctcaggaagatatgctacaagatttaggatacggatatataggagacactattaggactttcttcaaagagaacacagaaatccgtccacgagataaaagcattttaactttagaagacgtggatagtttcttaactacgttatcatccgtaactaaagaatcgcatcaaataaaattattgactgatattgcatccgtttgtacatgtaatgatttaaaatgtgtagtcatgcttattgataaagatctaaaaattaaagcgggtcctcggtacgtacttaacgctattagtcctcatgcctatgatgtgtttagaaaatctaataacttgaaagagataatagaaaattcatctaaacaaaatctagactctatatctatttctgttatgactccaattaatcccatgttagcggaatcgtgtgattctgtcaataaggcgtttaaaaaatttccatcaggaatgtttgcggaagtcaaatacgatggtgaaagagtacaagttcataaaaataataacgagtttgccttctttagtagaaacatgaaaccagtactctctcataaagtggattatctcaaagaatacataccgaaagcatttaaaaaagctacgtctatcgtattggattctgaaattgttcttgtagacgaacataatgtaccgctcccgtttggaagtttaggtatacacaaaaagaaagaatataaaaactctaacatgtgtttgttcgtgtttgactgtttgtactttgatggattcgatatgacggacattccattgtacgaacgaagatcttttctcaaagatgttatggttgaaatacccaatagaatagtattctcagagttgacgaatattagtaacgagtctcagttaactgacgtattggatgatgcactaacgagaaaattagaaggattggtcttaaaagatattaatggagtatacgaaccgggaaagagaagatggttaaaaataaagcgagactatttgaacgagggttccatggcagattctgccgatttagtagtactaggtgcctactatggtaaaggagcaaagggtggtatcatggcagtctttctaatgggttgttacgacgatgaatccggtaaatggaagacggttaccaagtgttcaggacacgatgataatacgttaagggagttgcaagaccaattaaagatgattaaaattaacaaggatcccaaaaaaattccagagtggttagtagttaataaaatctatattcccgattttgtagtagaggatccgaaacaatctcagatatgggaaatttcaggagcagagtttacatcttccaagtcccataccgcaaatggaatatccattagatttcctagatttactaggataagagaggataaaacgtggaaagaatctactcatctaaacgatttagtaaacttgactaaatcttaatagttacatacaaactgaaaattaaaataacactatttagttggtggtcgccatggatggtgttattgtatactgtctaaacgcgctagtaaaacatggcgaggaaataaatcatataaaaaatgatttcatgattaaaccatgttgtgaaagagtttgtgaaaaagtcaagaacgttcacatcggcggacaatctaaaaacaatacagtgattgcagatttgccatatctggataatgctgtatcggatgtatgcaattcactgtataaaaagaatgtatcaagaatatccagatttgctaatttgataaagatagatgacgatgacaagactcctactggtgtatataattattttaaacctaaagatgccattcctgttatcatatctataggaaaggataaagatgtctgtgaactattaatctcatcagacatatcgtgtgcatgcgtggagttaaattcatatcacgtagccattcttcccatggatgtttccttttttaccaaaggaaatgcatcattgattattctcctgtttgatttctctatcgatgcggcacctctcttaagaagtgtaaccgataataatgttattatatctagacaccagcgtctacatgacgagcttccgagttccaattggttcaagttttacataagtataaagtccgactattgttctatattatatatggttgttgatggatctgtgatgcatgcgatagctgataatagaactcacgcaattattagcaaaaatatattagacaatactacgattaacgatgagtgtagatgctgttattttgaaccacagattaggattcttgatagagatgagatgctcaatggatcatcgtgtgatatgaacagacattgtattatgatgaatttacctgatgtaggcgaatttggatctagtatgttggggaaatatgaacctgacatgattaagattgctctttcggtggctggtaatttaataagaaatcgagactacattcccgggagacgaggatatagctactacgtttacggtatagcctctagataatttttttaagcacgaaataaaaaacataattttaaaccaatctatttcatactattttgtgtgatcaccatggacataaagatagatattagtatttctggtgataaatttacggtgactactaggagggaaaatgaagaaagaaaaaaatatctacctctccaaaaagaaaaaactactgatgttatcaaacctgattatcttgagtacgatgacttgttagatagagatgagatgtttactattctagaggaatattttatgtacagaggtctattaggcctcagaataaaatatggacgactctttaacgaaattaaaaaattcgacaatgatgcggaagaacaattcggtactatagaagaactcaagcagaaacttagattaaattctgaagagggagcagataactttatagattatataaaggtacaaaaacaggatatcgtcaaacttactgtatacgattgcatatctatgataggattgtgtgcatgcgtggtagatgtttggagaaatgagaaactgttttctagatggaaatattgtttacgagcgattaaactgtttattaatgatcacatgcttgataagataaaatctatactgcagaatagactagtatatgtggaaatgtcatagaaagttaaaagttaatgagagcaaaaatatataaggttgtattccatatttgttatttttttctgtaatagttagaaaaatacattcgatggtctatctatcagattattatgtgttataaggtactttttctcataataaactagagtatgagtaagatagtgtttttcaaaacatataaatctaaaattgatggatgagatatacagctattaatttcgaaaatatattttaatctgataactttaaacatggatttttaatggtggtttaacgttttaaaaaaagattttgttattgtagtatatgataatattaaaagatggatataaagaatttgctgactgcatgtactattttttacattactacattggctacggcagatatacctacttcgtcactgccacacgctccggtaaacggggcatgtgacgagggagaatatcttgataagaggcataatcaatgttgtaatcagtgtccacctggagaatttgccaaggtcagatgtaatggtaacgataacacaaaatgtgaacgctgcccacctcatacatataccgcaatccccaattactctaatggatgtcatcaatgtagaaaatgcccaacaggatcatttgataaggtaaagtgtaccggaacacagaacagtaaatgttcgtgtcttcctggttggtattgcgctactgattcttcacagactgaagattgtcgagattgtataccaaaaaggagatgtccatgcggatactttggtggaatagatgaacaaggaaatcctatttgtaaatcgtgttgtgttggtgaatattgcgactacctacgtaattatagacttgatccatttcctccatgcaaactatctaaatgtaattaattatgattttgatgataatgttaccatacattatatcgctacttggttagtgtattattcagtatgaagacctattaataattacttatcttttgacgatcttgttataattataatataaaaatacttatggcatagtaactcataattgctgacgcgataaattcgtaataatctgttttgttcaaatttttataaggaatctacaggcataaaaataaaaatataatttataatatactcttacagcgcgccatcatgaataacagcagtgaattgattgctgttattaatggatttagaaatagtggacgattttgtgatattaatatagttattaatgatgaaaggataaacgctcataaactcatcctatctggagcctccgaatatttttccattctgttttccaataattttatcgattctaatgaatacgaagttaatctaagtcatttagattatcaaagcgtaaacgatttgatcgattacatttatgggatacctttgagcctaactaacgataacgtgaaatatattctttcaaccgctgattttttacaaattggatctgctattacggagtgtgaaaattacatacttaaaaatctttgttctagaaactgtatcgatttctacatatacgctgataaatataataacaagaaaatagaatcagcgtcgtttaacacaatattacaaaatattttgagactcatcaacgatgaaaactttaaatacttaacagaggaatcaatgataaaaattttaagcgatgatatgttaaatataaaaaatgaggatttcgccccactaattctcattaaatggttagagagtactcaacaaccatgcaccgtcgagttacttaaatgcctcagaatatcattgctttccccacaagttataaaatcactttatagtcatcgactggttagttcaatctacgaatgtataacattcttaaacaatatagcattcttggatgaatcatttcctagataccatagcatcgagttgatatctatcggtataagtaattcgcatgataagatttccataaactgctacaatcataaaaaaaatacatgggaaatgatatcttcacgtagatataggtgtagtttcgcagtggccgtcctggataatattatttatatgatgggtggatatgatcagtccccgtatagaagttcaaaggttatagcgtacaatacatgtacaaattcttggatatatgatataccagagctaaaatatcctcgttctaattgtgggggactggctgatgacgaatacatttattgtataggcggcatacgcgatcaggattcatcgttgacatctagtattgatagatggaagccatcaaaaccatattggcagaagtatgctaaaatgcgcgaaccaaaatgtgatatgggggttgcgatgttaaacggattaatatatgttataggtggaatcgttaaaggtgacacgtgtaccgacgcactagagagtttatcagaagatggatggatgaagcatcaacgtcttccaataaaaatgtccaatatgtcgacgattgttcatgatggcaagatttatatatctggaggttacaacaatagtagtgtagttaatgtaatatcgaatttagtccttagctataattcgatatatgatgaatggaccaaattatcatcattaaacattcctagaattaatcccgctctatggtcagcgcataataaattatatgtaggaggaggaatatctgatgatgttcgaactaatacatctgaaacatacgacaaagaaaaagattgttggacattggataatggtcacgtgttaccacgcaattatataatgtataaatgcgaaccgattaaacataaatatccattggaaaaaacacagtacacgaatgattttctaaagtatttggaaagttttataggtagttgatagaacaaaatacataattttgtaaaaataaatcactttttatactaatatgacacgattaccaatacttttgttactaatatcattagtatacgctacaccttttcctcagacatctaaaaaaataggtgatgatgcaactctatcatgtaatcgaaataatacaaatgactacgttgttatgagtgcttggtataaggagcccaattccattattcttttagctgctaaaagcgacgtcttgtattttgataattataccaaggataaaatatcttacgactctccatacgatgatctagttacaactatcacaattaaatcattgactgctagagatgccggtacttatgtatgtgcattctttatgacatcgcctacaaatgacactgataaagtagattatgaagaatactccacagagttgattgtaaatacagatagtgaatcgactatagacataatactatctggatctacacattcaccggaaactagttctgagaaacctgattatatagataattctaattgctcgtcggtattcgaaatcgcgactccggaaccaattactgataatgtagaagatcatacagacaccgtcacatacactagtgatagcattaatacagtaagtgcatcatctggagaatccacaacagacgagactccggaaccaattactgataaagaagatcatacagtcacagacactgtctcatacactacagtaagtacatcatctggaattgtcactactaaatcaaccaccgatgatacgtacaatgataatgatacagtaccaccaactactgtaggcggtagtacaacctctattagcaattataaaaccaaggactttgtagaaatatttggtattaccgcattaattatattgtcggccgtggcaatattctgtattacgtattatatatgtaataaacgttcacgtaaatacaaaacagagaacaaagtctagatttttgacttacataaatgtctgggatagtaaaatctatcatattgagcgggccatctggtttaggaaagacagccatagccaaaagactatgggaatatatttggatttgtggtgtcccataccactagatttcctcgtcctatggaacgagaaggtgtcgattaccattacgttaacagagaggccatctggaagggaatagccgccggaaactttctagaacatactgagtttttaggaaatatttacggaacttctaaaactgctgtgaatacagcggctattaataatcgtatttgtgtgatggatctaaacatcgatggcgttagaagtcttaaaaatacgtacctaatgccttactcggtgtatataagacctacctctcttaaaatggttgagaccaagcttcgttgtagaaacactgaagcggatgatgagattcatcgtcgtgtgatgttggcaaaaactgacatggatgaggcaggtgaagccggtctattcgacactattatcattgaagatgatgtgaatttagcatatagtaagttaattcagatactacaggaccgtattagaatgtattttaacactaattagagacttaagacttaaaacttgataattaataatataactcgtttttatatgtggctatttcaacgtctaatgtattagttaaatattaaaacttaccacgtaaaacttaaaatttaaaatgatatttcattgacagatagatcacacattatgaactttcaaggacttgtgttaactgacaattgcaaaaatcaatgggtcgttggaccattaataggaaaaggtggatttggtagtatttatactactaatgacaataattatgtagtaaaaatagagcccaaagctaacggatcattatttaccgaacaggcattttatactagagtacttaaaccatccgttatcgaagaatggaaaaaatctcacaatataaagcacgtaggtcttatcacgtgcaaggcatttggtctatacaaatccattaatgtggaatatcgattcttggtaattaatagattaggtgcagatctagatgcggtgatcagagccaataataatagactaccaaaaaggtcggtgatgttgatcggaatcgaaatcttaaataccatacaatttatgcacgagcaaggatattctcacggagatattaaagcgagtaatatagtcttagatcaaatagataagaataaattatatctagtggattacggattggtttctaaattcatgtctaatggcgaacatgttccatttataagaaatccaaataaaatggataacggtactctagaatttacacctatagattcgcataaaggatacgttgtatctagacgtggagatctagaaacacttggatattgtatgattagatggttgggaggtatcttaccatggactaagatatctgaaacaaagaattgtgcattagtaagtgccacaaaacagaaatatgttaacaatactgcgactttgttaatgaccagtttgcaatatgcacctagagaattgctgcaatatattaccatggtaaactctttgacatattttgaggaacccaattacgacaagtttcggcacatattaatgcagggtgtatattattaagtgtggtgtttggtcgataaaaattaaaaaataacttaatttattattgatctcgtgtgtacaaccgaaatcatggcgatgttttacgcacacgctctcggtgggtacgacgagaatcttcatgcctttcctggaatatcatcgactgttgccaatgatgtcaggaaatattctgttgtgtcagtttataataacaagtatgacattgtaaaagacaaatatatgtggtgttacagtcaggtgaacaagagatatattggagcactgctgcctatgtttgagtgcaatgaatatctacaaattggagatccgatccatgatcaagaaggaaatcaaatctctatcatcacatatcgccacaaaaactactatgctctaagcggaatcgggtacgagagtctagacttgtgtttggaaggagtagggattcatcatcacgtacttgaaacaggaaacgctgtatatggaaaagttcaacatgattattctactatcaaagagaaggccaaagaaatgagtacacttagtccaggacctatcatcgattaccacgtctggataggagattgtatctgtcaagttactgctgtggacgtacatggaaaggaaattatgagaatgagattcaaaaagggtgcggtgcttccgatcccaaatctggtaaaagttaaacttggggagaatgatacagaaaatctttcttctactatatcggcggcaccatcgaggtaaccacctctctggaagacagcgtgaataatgtactcatgaaacgtttggaaactatacgccatatgtggtctgttgtatatgatcattttgatattgtgaatggtaaagaatgctgttatgtgcatacgcatttgtctaatcaaaatcctataccgagtactgtaaaaacaaatttgtacatgaagactatgggatcatgcattccatggaagctctagagtatcttagcgaactgaaggaatcaggtggatggagtcccagaccagaaatgcaggaatttgaatatccagatggagtggaagacactgaatcaattgagagattggtagaggagttcttcaatagatcagaacttcaggctggtaattctattaattgttaaacatacatctgtttcagctaagcaactaagaacacgtatacggcagcagcttccttctatactctcatcttttaccaacacaaagggtggatatttgttcattggagttgataataatacacacaaagtatttggattcacggtgggttacgactacctcagactgatagagaatgatatagaaaagcatatcaaaagactttgtgttgtgtatttctgtgagaagaaagaggacatcaagtacgcgtgtcgattcatcaaggtatataaacctggggatgaggctacctcgacatacgtgtgcgctatcaaagtggaaagatgctgttgtgctgtgtttgcagattggccagaatcatggtatatggatactaatggtatcaagaagtattctccagatgaatgggtgtcacatataaaattttaattaatgtaactatagagaacaaataataaggttgtaatatcatatagacaataactaacaattaattagtaactgttatctcttttttaattaaccaactaactatatacctattaatacatcgtaattatagttcttaacatctattaatcattaattcgcttctttaattttttataaactaacattgttaattgaaaagggataacatgttacagaatataaattatatatggatttttttaaaaaggaaatacttgactggagtatatatttatctcttcattatatagcacgcgtgttttccaatttttccacatcccatataatacaggattataatctcgttcgaacatacgagaaagtggataaaacaatagttgattttttatctaggttgccaaatttattccatattttagaatatggggaaaatattctacatatttattctatggatgatgctaatacgaatattataattttttttctagatagagtattaaatattaataagaacgggtcatttatacacaatctcgggttatcatcatccattaatataaaagaatatgtatatcaattagttaataatgatcatccagataataggataagactaatgcttgaaaatggacgtagaacaagacattttttgtcctatatatcagatacagttaatatctatatatgtattttaataaatcatggattttatatagatgccgaagacagttacggttgtacattattacatagatgtatatatcactataagaaatcagaatcagaatcatacaatgaattaattaagatattgttaaataatggatcagatgtagataaaaaagatacgtacggaaacacaccttttatcctattatgtaaacacgatatcaacaacgtggaattgtttgagatatgtttagagaatgctaatatagactctgtagactttaatagatatacacctcttcattatgtctcatgtcgtaataaatatgattttgtaaagttattaatttctaaaggagcaaatgttaatgcgcgtaataaattcggaactactccattttattgtggaattatacacggtatctcgcttataaaactatatttggaatcagacacagagttagaaatagataatgaacatatagttcgtcatttaataatttttgatgctgttgaatctttagattatctattatccagaggagttattgatattaactatcgtactatatacaacgaaacatctatttacgacgctgtcagttataatgcgtataatacgttggtctatctattaaacaaaaatggtgattttgagacgattactactagtggatgtacatgtatttcggaagcagtcgcaaacaacaacaaaataataatggaagtactattgtctaaacgaccatctttgaaaattatgatacagtctatgatagcaattactaaacataaacagcataatgcagatttattgaaaatgtgtataaaatatactgcgtgtatgaccgattatgatactcttatagatgtacagtcgctacagcaatataaatggtatattttaagatgtttcgatgaaatagatatcatgaagagatgttatataaaaaataaaactgtattccaattagttttttgtatcaaagacattaatactttaatgagatacggtaaacatccttctttcgtgaaatgcactagtctcgacgtatacggaagtcgtgtacgtaatatcatagcatctattagatatcgtcagagattaattagtctattatccaagaagctggatcctggagataaatggtcgtgttttcctaacgaaataaaatataaaatattggaaaactttaacgataacgaactatccacatatctaaaaatcttataaacattattaaaatataaaatctaagtaggataaaatcacactacatcattgtttccttttagtgctcgacagtgtatactatttttaacgctcataaataaaaatgaaaacgatttccgttgttacgttgttatgcgtactacctgctgttgtttattcaacatgtactgtacccactatgaataacgctaaattaacgtctaccgaaacatcgtttaatgataaccagaaagttacgtttacatgtgatcagggatatcattctttggatccaaatgctgtctgtgaaacagataaatggaaatacgaaaatccatgcaaaaaaatgtgcacagtttctgattatgtctctgaactatataataaaccgctatacgaagtgaattccaccatgacactaagttgcaacggcgaaacaaaatattttcgttgcgaagaaaaaaatggaaatacttcttggaatgatactgttacgtgtcctaatgcggaatgtcaacctcttcaattagaacacggatcgtgtcaaccagttaaagaaaaatactcatttggggaatatatgactatcaactgtgatgttggatatgaggttattggtgcttcgtacataagttgtacagctaattcttggaatgttattccatcatgtcaacaaaaatgtgatatgccgtctctatctaacggattaatttccggatctacattttctatcggtggcgttatacatcttagttgtaaaagtggttttacactaacggggtctccatcatccacatgtatcgacggtaaatggaatcccatactcccaatatgtgtacgaactaacgaaaaatttgatccagtggatgatggtcccgacgatgagacagatttgagcaaactctcgaaagacgttgtacaatatgaacaagaaatagaatcgttagaagcaacttatcatataatcatagtggcgttgacaattatgggcgtcatatttttaatctccgttatagtattagtttgttcctgtgacaaaaataatgaccaatataagttccataaattgctaccgtaaatataaatccgttaaaataattaataatttaataacaaacaagtatcaaaagattaaagacttatagctagaatcaattgagatgtcttcttcagtggatgttgatatctacgatgccgttagagcatttttactcaggcactattataacaagagatttattgtgtatggaagaagtaacgccatattacataatatatacaggctatttacaagatgcgccgttataccgttcgatgatatagtacgtactatgccaaatgaatcacgtgttaaacaatgggtgatggatacacttaatggtataatgatgaatgaacgcgatgtttctgtaagcgttggcaccggaatactattcatggaaatgtttttcgattacaataaaaatagtatcaacaatcaactaatgtatgatataattaatagcgtatctataattctagctaatgagagatatagaagcgcttttaacgacgatggtatatacatccgtagaaatatgattaacaagttgtacggatacgcatctctaactactattggcacgatcgctggaggtgtttgttattatctgttgatgcatctagttagtttgtataaataattatttcaatatactagttaaaattttaagattttaaatgtataaaaaactaataacgtttttatttgtaataggtgcattagcatcctattcgaataatgagtacactccgtttaataaactgagtgtaaaactctatatagatggagtagataatatagaaaattcatatactgatgataataatgaattggtgttaaattttaaagagtacacaatttctattattacagagtcatgcgacgtcggatttgattccatagatatagatgttataaacgactataaaattattgatatgtataccattgactcgtctactattcaacgcagaggtcacacgtgtagaatatctaccaaattatcatgccattatgataagtacccttatattcacaaatatgatggtgatgagcgacaatattctattactgcagagggaaaatgctataaaggaataaaatatgaaataagtatgatcaacgatgatactctattgagaaaacatactcttaaaattggatctacttatatatttgatcgtcatggacatagtaatacatattattcaaaatatgatttttaaaaatttaaaatatattatcacttcagtgacagtagtcaaataacaaacaacaccatgagatatattataattctcgcagttttgttcattaatagtatacatgctaaaataactagttataagtttgaatccgtcaattttgattccaaaattgaatggactggggatggtctatacaatatatcccttaaaaattatggcatcaagacgtggcaaacaatgtatacaaatgtaccagaaggaacatacgacatatccgcatttccaaagaatgatttcgtatctttctgggttaaatttgaacaaggcgattataaagtggaagagtattgtacgggactatgcgtcgaagtaaaaattggaccaccgactgtaacattgactgaatacgacgaccatatcaatttgtacatcgagcatccgtatgctactagaggtagcaaaaagattcctatttacaaacgcggtgacatgtgtgatatctacttgttgtatacggctaacttcacattcggagattctaaagaaccagtaccatatgatatcgatgactacgattgcacgtctacaggttgcagcatagactttgtcacaacagaaaaagtgtgcgtgacagcacagggagccacagaagggtttctcgaaaaaattactccatggagttcgaaagtatgtctgacacctaaaaagagtgtatatacatgcgcaattagatccaaagaagatgttcccaatttcaaggacaaaatggccagagttatcaagagaaaatttaatacacagtctcaatcttatttaactaaatttctcggtagcacatcaaatgatgttaccacttttcttagcatgcttaacttgactaaatattcataactaatttttattaatgatacaaaaacgaaataaaactgcatattatacactggttaacgcccttataggctctaaccattttcaagatgaggtccctgattatagtccttctgttcccctctatcatctactccatgtctattagacgatgtgagaagactgaagaggaaacatggggattgaaaatagggttgtgtataattgccaaagatttctatcccgaaagaactgattgcagtgttcatctcccaactgcaagtgaaggattgataactgaaggcaatggattcagggatatacgaaacaccgataaattataaaaaaagcaatgtgtccgctgtttccgttaataatactattttcgtaactggcggattattcataaataactctaatagcacgatcgtggttaacaatatggaaaaacttgacatttataaagacaaacaatggtcgattatagaaatgcctatggctagggtatatcacggcattgactcgacatttggaatgttatattttgccggaggtctatccgttaccgaacaatatggtaatttagagaaaaacaacgagatatcttgttacaatcctagaacgaataagtggtttgatatttcatatactatttataagatatccatatcatcattgtgtaaactaaataacgtcttctatgtatttagtaaggacattggatatgtggaaaagtatgatggtgcatggaagttagtacatgatcgtctccccgctataaaggcattatcaacttctccttattgattgaaaatgaaaatataaatagtttttatgtatagcagtattaccctatagttttattgcttactactaacatggatacagatgttacaaatgtagaagatatcataaatgaaatagatagagagaaagaagaaatactaaaaaatgtagaaattgaaaataataaaaacattaacaagaatcatccaagtggatatattagagaagcactcgttattaataccagtagtaatagtgattccattgataaagaagttatagaatgtatcagtcacgatgtaggaatatagatcatatctactaatttttataatcgatacaaaacataaaaaacaactcgttattacatagcaggcatggaatccttcaagtattgttttgataacgatggcaagaaatggattatcggaaatactttatattctggtaattcaatactatataaggtcagaaaaaatttcactagttcgttctacaattacgtaatgaagatagatcacaaatcacacaagccattgttgtctgaaatacgattctatatatctgtattggatcctttgactatcgacaactggacacgggaacgtggtataaagtatttggctattccagatctgtatggaattggagaaaccgatgattatatgttcttcgttataaaaaattcgggaagagtattcgccccaaaggatactgaatcagtcttcgaagcatgcgtcactatgataaacacgttagagtttatacactctcgaggatttacccatggaaaaatagaaccgaggaatatactgattagaaataaacgtctttcactaattgactattctagaactaacaaactatacaagagtggaaactcacatatagattacaacgaggacatgataacttcaggaaatatcaattatatgtgtgtagacaatcatcttggagcaacagtttcaagacgaggagatttagaaatgttgggatattgcatgatagaatggttcggtggcaaacttccatggaaaaacgaaagtagtataaaagtaataaaacaaaaaaaagaatataaaaaatttatagctactttctttgaggactgttttcctgaaggaaatgaacctctggaattagttagatatatagaattagtatacacgttagattattctcaaactcctaattatgacagactacgtaaactgtttatacaagattgaaattatattcttttttttatagagtgtggtagtgttacggatatctaatattaatattagactatctctatcgcgctacacgaccaatatcgattactatggatatcttctatgaaaggagagaatgtatttatttctccagcgtcaatctcgtcagtattgacaatactgtattatggagctaatggatccactgctgaacagctatcaaaatatgtagaaacggaggagaacacggataaggttagcgctcagaatatctcattcaaatccatgaataaagtatatgggcgatattctgccgtgtttaaagattcctttttgagaaaaattggcgataagtttcaaactgttgacttcactgattgtcgcactatagatgcaatcaacaagtgtgtagatatctttactgaggggaaaatcaatccactattggatgaaccattgtctcctagcaattagtgccgtatactttaaagcaaaatggttgacgccattcgaaaaggaatttaccagtgattatcccttttacgtatctccgacggaaatggtagacgtaagtatgatgtctatgtacggcaaggcatttaatcacgcatctgtaaaagaatcattcggcaacttttcaatcatagaactgccatatgttggagatactagtatgatggtcattcttccagacaagattgatggattagaatccatagaacaaaatctaacagatacaaattttaagaaatggtgtgactttatggatgctatgtttatagatgttcacattcccaagtttaaggtaacaggctcgtataatctggtggatactctagtaaagtcaggactgacagaggtgttcggttcaactggagattatagcaatatgtgtaatttagatgtgagtgtcgacgctatgatccacaaaacgtatatagatgtcaatgaagagtatacagaagcagctgcagcaacttctgtactagtggcagactgtgcatcaacaattacaaatgagttctgtgcagatcatccgttcatctatgtgattaggcatgttgatggaaaaattcttttcgttggtagatattgctctccgacaactaattgttaaccattttttttaaaaaaaatagaaaaaacatgtggtattagtgcaggtcgttgttcttccaattgcaattggtaagatgacggccaactttagtacccacgtcttttcaccacagcactgtggatgtgacagactgaccagtattgatgacgtcaaacaatgtttgactgaatatatttattggtcgtcctatgcataccgcaacaggcaatgcgctggacaattgtattccacactcctctcttttagagatgatgcggaattagtgttcatcgacattcgcgagctggtaaaaaatatgccgtgggatgatgtcaaagattgtacagaaatcatccgttgttatataccggatgagcaaaaaaccatcagagagatttcggccatcatcggactttgtgcatatgctgctacttactggggaggtgaagaccatcccactagtaacagtctgaacgcattgtttgtgatgcttgagatgctaaattacgtggattataacatcatattccggcgtatgaattgatgagttgtacatcttgacattttcttctttcttccagaaacaaactttttttacccactataaaataaaatgagtatactacctgttatatttttttattcttcattcgttcagacttttaacgcgcctgaatgtatcgacaaagggcaatattttgcatcattcatggagttagaaaacgagccagtaatcttaccatgtccttaaataaatacgctatcatccggatataatatattagatattttatgggaaaaacgaggagcggataatggtagcaatatgctaattctgaacccgacacaatcagactctggtatttatatatgcattaccacgaacgaaacctactgtgacatgatgtcgttaaatttgacaatcgtgtctgtctcagaatcaaatatagattttatctcgtatccacaaatagtaaatgagagatctactggcgaaatggtatgtcccaatattaatgcatttattgctagtaacgtaaacgcagatattatatggagcggacatcgacgccttagaaataagagacttaaacaacggacacctggaattattaccatagaagatgttagaaaaaatgatgctggttattatacatgtgttttagaatatatatacggtggcaaaacatataacgtaaccagaattgtaaaattagaggtacgggataaaataataccttctactatgcaattaccagatggcattgtaacttcaataggtagtaatttgactattgcatgcagagtatcgttgagacctcccacaacggatgcagacgtcttttggataagtaatggtatgtattacgaagaagatgatggggacggaaacggtagaataagtgtagcaaataaaatctatatgaccgataagagacgtgttattacatcccggttaaacattaatcctgtcaaggaagaagatgctacaacgtttacgtgtatggcgtttactattcctagcatcagcaaaacagttactgttagtataacgtgaatgtatgttgttacatttccatgtcaattgagtttataagaatttttatacattatcttccaacaaacaattgacgaacgtattgctatgattaactcccacgatactatgcatattattaatcattaacttgcagactatacctagtgctattttgacatactcatgttcttgtgtaattgcggtatctatattattaaagtacgtaaatctagctatagttttattatttaattttagataatataccgtctccttatttttaaaaattgccacatcctttattaaatcatgaatgggaatttctatgtcatcgttagtatattgtgaacaacaagagcagatatctataggaaagggtggaatgcgatacattgatctatgtagttttaaaacacacgcgaactttgaagaatttatataaatcattccatcgatacatccttctatgttgagatgtatatatccaggaattcgtttattaatatcgggaaatgtataaactaaaacattgcccgaaagcggtgcctctatctgcgttatatccgttcttaacttacaaaatgtaaccaatacctttgcatgacttgttttgttcggcaacgttagtttaaacttgacgaatggattaattacaatagcatgatccgcgcatctattaagtttttttactttaacgcccttgtatgtttttacagagactttatctaaatttctagtgcttgtatgtgttataaatataacgggatatagaaccgaatcacctaccttagatacccaattacattttatcagatccagataataaacaaattttgtcgccctaactaattctatattgttatatattttacaattggttatgatatcatgtaataacttggagtctaacgcgcatcgtcgtacgtttatacaattgtgatttagtgtagtatatctacacatgtatttttccgcactatagtattctggactagtgataaaactatcgttatatctatcttcaatgaactcatcgagatattgctctctgtcatattcatacacctgcataaactttctagacatcttacaatccgtgttattttaggatcatatttacatatttacgggtatatcaaagatgttagattagttaatgggaatcgtctataataatgaatattaaacaattatatgaggacttttaccacaaagcatcataaaaatgagtcgtcgtctgatttatgttttaaatatcaaccgcaaatcaactcataaaatacaagagaatgaaatatatacatattttagtcattgcaatatagaccatacttctacagaacttgattttgtagttaaaaactatgatctaaacagacgacaacctgtaactgggtatactgcactacactgctatttgtataataattactttacaaacgatgtactgaagatattattaaatcatggagtggatgtaacgatgaaaaccagtagcggacgtatgcctgtttatatattgcttactagatgttgtaatatttcacatgatgtagtgatagatatgatagacaaagataaaaaccacttattacatagagactattccaacctattactagagtatataaaatctcgttacatgttattaaaggaagaggatatcgatgagaacatagtatccactttattagataagggaatcgatcctaactttaaacaagacggatatacagcgttacattattattatttgtgtctcgcacacgtttataaaccaggtgagtgtagaaaaccgataacgataaaaaaggccaagcgaattatttctttgtttatacaacatggagctaatctaaacgcgttagataattgtggtaatacaccattccatttgtatcttagtattgaaatgtgtaataatattcatatgactaaaatgctgttgacttttaatccgaatttcgaaatatgtaataatcatggattaacgcctatactatgttatataacttccgactacatacaacacgatattcttgttatgttaatacatcactatgaaacaaatgttggagaaatgccgatagatgagcgtcgtatgatcgtattcgagtttatcaaaacatattctacacgtccggcagattcgataacttatttgatgaataggtttaaaaatataaatatttatacccgctatgaaggaaagacattattacacgtagcatgtgaatataataatacacacgtaatagattatcttatacgtatcaacggagatataaatgcgttaaccgacaataacaaacacgctacacaactcattatagataacaaagaaaattccccatataccattaattgtttactgtatatacttagatatattgtagataagaatgtgataagatcgttggtggatcaacttccatctctacctatctttcgtcgcttatcatactagtcatatcctaaatgttgatcatattccaccaaatgattgtgaaagagattgagattaaatcgtctaacaaacaattagtttttatgacattaacatataataaataaattaatcattattgacttaacgatgacgaaagttatcatcatcttaggattcttaattattaatacaaattcattgtctatgaaatgtgaacaaggtgtctcatattataattcacaagaattaaagtgttgtaaactatgtaagccaggaacatattcagatcatcgatgtgataaatacagcgataccatttgtggacattgtccgagtgacacattcacgtcaatatataatcgttctccttggtgtcatagttgtagaggtccatgtggtactaatcgagtagaggtcacaccttgtacacctaccacaaatagaatctgtcattgtgactcgaatagttattgtctccttaaagcttctgatggtaactgtgttacatgtgctcctaaaacaaaatgtggtcgtgggtatggaaagaaaggagaagatgaaatgggtaataccatttgtaagaaatgtcggaagggtacttattcagatattgtatctgactctgatcaatgtaaaccaatgacaagataagacttactcgcatctactggatagacataaaatatcctcctcgtaataatgaaatataatatacactaattattaatatcaataacaatcgagtattaatatataggtcatttttaaatcccttttgggttccgtcccaaacggcgtttcggtctgcgtcgccgccatggccatgccgagcctctccgcgtgctcctccatcgaggacgacttcaactatggcagctcggtggcgtctgccagcgtgcacatacgaatggcatttctaagaaaagtctacggtatcctttgtctacaatttcttttaacaacggcaacaactgcagtatttttatactttgactgcatgcggacatttatacaagggagtcctgttctaatattggcatcaatgttcggatctataggcttgattttcgcattgactttacacagacataaacatcccctgaatctgtacctgctttgtggatttacactgtcggaatctctaacgctggcctctgttgttactttctatgatgtgcatgtcgttatgcaagctttcatgctgactactgcagcgtttcttgctctgactacatatactctacaatcaaagagagatttcagtaaacttggagcaggattgtttgctgctttgtggattttaattttgtcaggactcttggggatatttgtgcaaaatgagacagtgaagctggtcctgtctgcttttggggcccttgtattctgtggattcattatctatgacacgcactcactaatacataagctctcgcctgaagagtatgtgttagcctctatcaatctctacttggatatcatcaatctgttcttgcatctgttgcagcttttggaagtatctaataagaaataaagtttaaaatagaattaataaaaacatataggtcattttttaaacatggattggaaaccaaggtagttagttaatacacacaagatatatttttttcacatcatccacccatgggtaacaccaaggttgttagttaataatatacaagatattttttctcactctgatccatgtaaaccaaggacgagataagacactctcattcctcatctacaacccattaaaaaaatggaaattaaagccctctattagcatagacggctacaggtctaccttcacaatggcctttccttgtgccaagttcagtccctgtcattgccacgctactaaggactccctgaataccgtggccgacgtcagacattgtctgactgaatacatcctgtgggtttctcatagatggacccatagagaaactgcagggtctctctacaggcttctcatctctttcagaactgatgcaacggagctctttggtggtgagttgaaggattcacttccgtgggacaattgcgtggagatcattaaatgtttcatcagaaatgactccatgaaaaccgccgaagaacttcgtgcaatcattggactttgtactcaatcagctatcgtctctggaagagtcttcaacgataagtatatcgacatactacttatgctgcgaaagattctgaacgagaacgactatctcaccctcttggatcatatccgcactgctaaatactaaatctccactacactttttatcatcttatgaggaatgattgccttcgtgaaataggaataattagcaccagaatagctatggattattgtggtagagagtgcactattctatgtcgtctactggatgaagatgtgacgtacaaaaaaataaaactagaaattgaaacgtgtcacaacttatcaaaacatatagatagacgaggaaacaatgcgctacattgttacgtctccaataaatgcgatacagacattaagattgttctctcgcggagtcgagagactttgtagaaacaacgaaggattaactccgctaggagtatacagtaagcatagatacgtaaaatctcagattgtgcatctactgatatccagctattcaaattcctctaacgaactcaagtcgaatataaatgatttcgatctgtattcggataatatcgacttacgtctgctaaaatacctaattgtggataaacggatacgtccgtccaagaatacgaattatgcaatcaatggtctcggattggtggatatatacgtaacgagagaccagaagtattgctatggcttcttaaatcagaatgttacagcaccggttacgtatttcgtacctgtatgtacgacagtgatatgtgtaagaactctcttcattactatatatcgtctcatagagaatctcaatctctatccaaggatgtaattaaatgtttgatcgataacaatgtttccatccatggcagagacgaaggaggatctttacccatccaatactactggtctttctcaaccatagatatagagattgttaaattattattaataaaggatgtggacacgtgtagagtatacgacgtcagccctatattagaggcgtattatctaaacaagcgatttagagtaaccccatataatgtagacatggaaatcgttaatcttcttattgagagacgtcatactcttgtcgacgtaatgcgtagtattacttcgtacgattccagagaatataaccactacatcatcgataacattctaaagagatttagacaacaggatgtacaagccatgttgataaactacttacattacggcgatatggtcgttcgatgcatgttagataacggacaacaactatcctctgcacgactactttgttaataataatctcgtcgatgtaaacgtcgtaaggtttatcgtggaaaatatggacacgcggctgtaaatcacgtatcgaacaatggccgtctatgtatgtacggtctgatattatcgagatttaataattgcgggtatcactgttatgaaaccatactgatagatgtatttgatatactaagcaagtacatggatgatatagatatgatcgataactctactatattacgcggtcgatgtcaataatatacaatttgcaaagcggttattggaatatggagcgagtgtcacgctcgataatcaatacggccatccagaaaagcagttaccaaagagaaaacaaaacgaagctagttgatttattactgagttaccatcccactctagagactatgattgacgcatttaatagagatatacgctatctatatcctgaaccattattcgcctgtatcagatacgccttaatcctagatgatgattttccttctaaagtaaagtatgatatcgccggtcgtcataaggaactaaagcgctatagagtagacattaatagaatgaagaatgtctacatatcaggcgtctccatgtttgatatattatttaaacgaagcaaacgccacaaattgagatacgcaaagaatccgacatcaaatggtacaaaaaagaactaacgtccatcattacagaaactgtaaagaacaatgagaggatcgactccatagtggacaacattaatacagacgataacttgatttcgaaattacccatggagatactttattactccattaaataatttatcatggagcgataatgtcctgtttcatttgtttccatgacatattacaaaatcgattccgtccaagatgataaaaacatttaccggcatcataaacacggagtttattttatatgtctcgcataaacattactaaaaaaatatattgttcggttttctttcacatctttaattatgaaaaagtaaatcattatgagatggacgagattgtacgcatcgttcgcgacagtatgtggtacatacctaacgtatttatggacgacggtaagaatgaaggtcacgtttctgtcaacaatgtctgtcatatgtattttacgttctttgatgtggatacatcgtctcatctgtttaagctagttattaaacactgcgatctgaataaacgaggtaactctccattacattgctatacgatgaatacacgatttaatccatctgtattaaagatattgttacaccacggcatgcgtaactttgatagcaaggatgaccactatcaatcgataacaagatctttgatatactaacggacaccattgatgactttagtaaatcatccgatctattgctgtgttatcttagatataaattcaatgggagcttaaactattacgttctgtacaaaggatccgaccctaattgcgccgacgaggatgaactcacttctcttcattactactgtaaacacatatccacgttctacgaaagcaattattacaagttaagtcacactaagatgcgagccgagaagcgattcatctacgcgataatagattatggagcaaacattaacgcggttacacacttaccttcaacagtataccaaacatagtcctcgtgtggtgtatgctcttttatctcgaggagccgatacgaggatacgtaataatcttgattgtacacccatcatggaacgattgtgcaacaggtcatattctcataatgttactcaattggcacgaacaaaaggaagaaggacaacatctactttatctattcataaaacataatcaaggatacactctcaatatactacggtatctattagataggttcgacattcagaaagacgaatactataataccgcctttcaaaattgtaacaacaatgttgcctcatacatcggatacgacatcaaccttccgactaaagacggtattcgacttggtgtttgaaaacagaaacatcatatacaaggcggatgttgtgaatgacatcatccaccacagactgaaagtatctctacctatgattaaatcgttgttctacaagatgtctctccctacgacgattactacgtaaaaaagatactagcctactgcctattaagggacgagtcattcgcggaactacatagtaaattctgtttaaacgaggactataaaagtgtatttatgaaaaatatatcattcgataagatagattccatcatcgtgacataagtcgcctcaaagagattcgaatctccgacaccgacctgtatacggtatcacagctatcttaaagccatacattcagacagtcacatttcatttcccatgtacgacgatctcatagaacagtgccatctatcgatggagcgtaaaagtaaactcgtcgacaaagcactcaataaattagagtctaccatcggtcaatctagactatcgtatttgcctccggaaattatgcgcaatatcatctaaacagtatgttgtacggaaagaaccattacaaatattatccatgatagaaagaaaatatctatatgattggagaagtaggaaacaggaacaagacaacgattactacattattaaatcatgaagtccgtattatactcgtatatattgtttctctcatgtataataataaacggaagagatatagcaccgcatgcaccatccgatggaaagtgtaaagacaacgaatacaaacgccataatttgtgtccgggaacatacgcttccagattatgcgatagcaagactaacacacgatgtacgccgtgtggttcgggtaccttcacatctcgcaataatcatttacccgcttgtctaagttgtaacggaagacgcgatcgtgtaacacgactcacaatagaatctgtgaatgctctcccggatattattgtcttctcaaaggatcatccggatgcaaggcatgtgtttcccaaacaaaatgtggaataggatacggagtatccggagacgtcatctgttctccgtgtggtctcggaacatattctcacaccgtctcttccgcagataaatgcgaacccgtacccagtaatacgtttaactatatcgatgtggaaattaatctgtatcccgtcaacgacacgtcgtgtactcggacgaccactaccggtctcagcgaatccatctcaacgtcggaactaactattactatgaatcataaagactgtaatcccgtatttcgtgatggatacttctccgttcttaataaggtagcaacttcaggattctttacaggagaaaggtgtgcactctgaatttcgagattaaatgcaataacaaagattcttcctccaaacagttaacgaaagcaaagaatgatactatcatgccgcattcggagacagtaactctagtgggcgacatctatatactatatagtaataccaatactcaagactacgaaactgatacaatctcttatcatgtgggtaatgttctcgatgtcgatagccatatgcccggtagttgcgatatacataaactgatcactaattccaaacccacccactttttatagtaagtttttcacccataaataataaatacaataattaatttctcgtaaaagtagaaaatatattctaatttattgcgcggtaaggaagtagaatcataaagaacagtactcaatcaatagcaattatgaaacaatatatcgtcctggcatgcatgtgcctggcggcagctgctatgcctgccagtcttcagcaatcatcctcatcctcctcctcgtgtacggaagaagaaaacaaacatcatatgggaatcgatgttattatcaaagtcacaaagcaagaccaaacaccgaccaatgataagatttgccaatccgtaacggaaattacagagtccgagtcagatccagatcccgaggtggaatcagaagatgattccacatcagtcgaggatgtagatcctcctaccacttattactccatcatcggtggaggtctgagaatgaactttggattcaccaaatgtcctcagattaaatccatctcagaatccgctgatggaaacacagtgaatgctagattgtccagcgtgtccccaggacaaggtaaggactctcccgcgatcactcgtgaagaagctcttgctatgatcaaagactgtgaggtgtctatcgacatcagatgtagcgaagaagagaaagacagcgacatcaagacccatccagtactcgggtctaacatctctcataagaaagtgagttacgaagatatcatcggttcaacgatcgtcgatacaaaatgtgtcaagaatctagagtttagcgttcgtatcggagacatgtgcaaggaatcatctgaacttgaggtcaaggatggattcaagtatgtcgacggatcggcatctgaaggtgcaaccgatgatacttcactcatcgattcaacaaaactcaaagcgtgtgtctgaatcgataactctattcatctgaaattggatgagtagggttaatcgaacgattcaggcacaccacgaattaaaaaagtgtaccggacactatattccggtttgcaaaacaaaaatgttcttaactacattcacaaaaagttacctctcgcgacttcttctttttctgtctcaatagtgtgatacgattatgacactattcctattcctattcctattcctatttcctttcagggtatcacaaaaatattaaacctctttctgatggtctcataaaaaaagttttacaaaaatatttttattctctttctctctttgatggtctcataaaaaaagttttacaaaaatatttttattctctttctctctttgatggtctcataaaaaaagttttacaaaaatatttttattctctttctctctttgatggtctcataaaaaaagttttacaaaaatatttttattctctttctctctttgatggtctcataaaaaaagttttacaaaaatatttttattctctttctctctttgatggtctcataaaaaaagttttacaaaaatatttttattctctttctctctttgatggtctcataaaaaaagttttacaaaaatatttttattctctttctctctttgatggtctcataaaaaaagttttacaaaaatatttttattctctttctctctttgatggtctcataaaaaaagttttacaaaaatatttttattctctttctctctttgatggtctcataaaaaaagttttacaaaaatatttttattctctttctctctttgatggtctcataaaaaaagttttacaaaaatatttttattctctttctctctttgatggtctcataaaaaaagttttacaaaaatatttttattctctttctctctttgatggtctcataaaaaaagttttacaaaaatatttttattctctttctctctttgatggtctcataaaaaaagttttacaaaaat

SEQ ID NO: 11 - DNA, 188768 bp, Vaccinia virus
  LIVP 8.1.1
atcaaagagagaaagagaataaaaatatttttgtaaaacttttttatgagaccatcaaagagagaaagagaataaaaatatttttgtaaaactttttttatgagaccatcaaagagagaaagagaataaaaatatttttgtaaaactttttttatgagaccatcaaagagagaaagagaataaaaatatttttgtaaaactttttttatgagaccatcaaagagagaaagagaataaaaatatttttgtaaaactttttttatgagaccatcaaagagagaaagagaataaaaatatttttgtaaaactttttttatgagaccatcaaagagagaaagagaataaaaatatttttgtaaaactttttttatgagaccatcaaagagagaaagagaataaaaatatttttgtaaaactttttttatgagaccatcaaagagagaaagagaataaaaatatttttgtaaaactttttttatgagaccatcaaagagagaaagagaataaaaatatttttgtaaaactttttttatgagaccatcaaagagagaaagagaataaaaatatttttgtaaaactttttttatgagaccatcaaagagagaaagagaataaaaatatttttgtaaaactttttttatgagaccatcaaagagagaaagagaataaaaatatttttgtaaaactttttttatgagaccatcaaagagagaaagagaataaaaatatttttgtaaaactttttttatgagaccatcaaagagagaaagagaataaaaatatttttgtaaaactttttttatgagaccatcaaagagagaaagagaataaaaatatttttgtaaaactttttttatgagaccatcaaagagagaaagagaataaaaatatttttgtaaaactttttttatgagaccatcaaagagagaaagagaataaaaatatttttgtaaaactttttttatgagaccatcaaagagagaaagagaataaaaatatttttgtaaaactttttttatgagaccatcagaaagaggtttaatatttttgtgatactctgaaaggaaataggaataggaataggaatagtgtcataatcgtatcacactattgagacagaaaaagaagaagtcgcgagaggtaactttttgtgaatgtagttaagaacatttttgttttgcaaaccggaatatagtgtccggtacacttttttaattcgtggtgtgcctgaatcgttcgattaaccctactcatccaatttcagatgaatagagttatcgattcagacacacgctttgagttttgttgaatcgatgagtgaagtatcatcggttgcaccttcagatgccgatccgtcgacatacttgaatccatccttgacctcaagttcagatgattccttgcacatgtctccgatacgaacgctaaactctagattcttgacgcattttgtatcgacgatcgttgaaccgatgatatcttcgtaactcactttcttatgagagatgttagacccgagtactggatgggtcttgatgtcgctgtctttctcttcttcgctacatctgatgtcgatagacacttcacagtctttgatcatagcaagagcttcttcatgagtgatcgcgggagagtccttaccttgtcctggggacacgctggacaatctagcattcactgtgtttccatcagcggattctgagatggatttaatctgaggacatttggtgaatccaaagttcattctcagacctccaccgatgatggagtaataagtggtaggaggatctacatcctcgactgatgtggaatcatcttctgattccacctcgggatctggatctgactcggactctgtaatttccgttacggattggcaaatcttatcattggtcggtgtttggtcttgctttgtgactttgataataacatcgattcccatatgatgtttgttttcttcttccgtacacgaggaggaggatgaggatgattgctgaagactggcaggcatagcagctgccgccaggcacatgcatgccaggacgatatattgtttcataattgctattgattgagtactgttctttatgattctacttccttaccgtgcaataaattagaatatattttctacttttacgagaaattaattattgtatttattatttatgggtgaaaaacttactataaaaagtgggtgggtttggaattagtgatcagtttatgtatatcgcaactaccgggcatatggctatcgacatcgagaacattacccacatgataagagattgtatcagtttcgtagtcttgagtattggtattactatatagtatatagatgtcgcccactagagttactgtctccgaatgcggcatgatagtatcattctttgctttcgttaactgtttggaggaagaatctttgttattgcatttaatctcgaaattcagagtgcacacctttctcctgtaaagaaacctgaagtcgctaccttattaagaacggagaagtatccatcacgaaatacgggattacagtctttatgattcatagtaatagttagttccgacgttgagatggattcgctgagaccggtagtggtcgtccgagtacacgacgtgtcgttaactggatacaggttaatttccacatcgatatagttaaacgtatttctgggtacgggttcgcatttatctgcggaagagacggtgtgagaatatgttccgagaccacacggagaacagatgacgtctccggatactccgtatcctattccacattttgtttgggaaacacatgccttgcatccggatgatcctttgagaagacaataatatccgggagagcattcacagattctattgtgagtcgtgttacacgatcgcgtcttccgttacaacttagacaagcgggtaaatgattattgcgagatgtgaaggtacccgaaccacacggcgtacatcgtgtgttagtcttgctatcgcataatctggaagcgtatgttcccggacacaaattatggcgtttgtattcgttgtctttacactttccatcggatggtgcatgcggtgctatatctcttccgtttattattatacatgagagaaacaatatatacgagtataatacggacttcatgatttaataatgtagtaatcgttgtcttgttcctgtttcctacttctccaatcatatagatattttctttctatcatggataatatttgtaatggttctttccgtacaacatactgtttagatgatattgcgcataatttccggaggcaaatacgatagtctagattgaccgatggtagactctaatttattgagtgctttgtcgacgagtttacttttacgctccatcgatagatggcactgttctatgagatcgtcgtacatgggaaatgaaatgtgactgtctgaatgtatggctttaagatagctgtgataccgtatacaggtcggtgtcggagattcgaatctctttgaggcgacttatgtcacgatgatggaatctatcttatcgaatgatatatttttcataaatacacttttatagtcctcgtttaaacagaatttactatgtagttccgcgaatgactcgtcccttaataggcagtaggctagtatcttttttacgtagtaatcgtcgtagggagagacatcttgtagaacaacgatttaatcataggtagagatactttcagtctgtggtggatgatgtcattcacaacatccgccttgtatatgatgtttctgttttcaaacaccaagtcgaataccgtctttagtcggaaggttgatgtcgtatccgatgtatgaggcaacattgttgttacaattttgaaaggcggtattatagtattcgtctttctgaatgtcgaacctatctaatagataccgtagtatattgagagtgtatccttgattatgttttatgaatagataaagtagatgttgtccttcttccttttgttcgtgccaattgagtaacattatgagaatatgacctgttgcacaatcgttccatgatgggtgtacaatcaagattattacgtatcctcgagataaaagagcatacaccacacgaggactatgtttggtatactgttgaaggtaagtgtgtaaccgcgttaatgtttgctccataatctattatcgcgtagatgaatcgcttctcggctcgcatcttagtgtgacttaacttgtaataattgctttcgtagaacgtggatatgtgtttacagtagtaatgaagagaagtgagttcatcctcgtcggcgcaattagggtcggatcctttgtacagaacgtaatagtttaagctcccattgaatttatatctaagataacacagcaatagatcggatgatttactaaagtcatcaatggtgtccgttagtatatcaaagatcttgttatcgattgatagtggtcatccttgctatcaaagttacgcatgccgtggtgtaacaatatctttaatacagatggattaaatcgtgtattcatcgtatagcaatgtaatggagagttacctcgtttattcagatcgcagtgtttaataactagcttaaacagatgagacgatgtatccacatcaaagaacgtaaaatacatatgacagacattgttgacagaaacgtgaccttcattcttaccgtcgtccataaatacgttaggtatgtaccacatactgtcgcgaacgatgcgtacaatctcgtccatctcataatgatttactttttcataattaaagatgtgaaagaaaaccgaacaatatatttttttagtaatgtttatgcgagacatataaaataaactccgtgtttatgatgccggtaaatgtttttatcatcttggacggaatcgattttgtaatatgtcatggaaacaaatgaaacaggacattatcgctccatgataaattatttaatggagtaataaagtatctccatgggtaatttcgaaatcaagttatcgtctgtattaatgttgtccactatggagtcgatcctctcattgttctttacagtttctgtaatgatggacgttagttcttttttgtaccatttgatgtcggattctttgcgtatctcaatttgtggcgtttgcttcgtttaaataatatatcaaacatggagacgcctgatatgtagacattcttcattctattaatgtctactctatagcgctttagttccttatgacgaccggcgatatcatactttactttagaaggaaaatcatcatctaggattaaggcgtatctgatacaggcgaataatggttcaggatatagatagcgtatatctctattaaatgcgtcaatcatagtctctagagtgggatggtaactcagtaataaatcaactagcttcgttttgttttctctttggtaactgcttttctggatggccgtattgattatcgagcgtgacactcgctccatattccaataaccgctttgcaaattgtatattattgacatcgaccgcgtaatatagtagagttatcgatcatatctatatcatccatgtacttgcttagtatatcaaatacatctatcagtatggtttcataacagtgatacccgcaattattaaatctcgataatatcagaccgtacatacatagacggccattgttcgatacgtgatttacagccgcgtgtccatattttccacgataaaccttacgacgtttacatcgacgagattattattaacaaagtagtcgtgcagaggatagttgttgtccgttatctaacatgcatcgaacgaccatatcgccgtaatgtaagtagtttatcaacatggcttgtacatcctgttgtctaaatctctttagaatgttatcgatgatgtagtggttatattctctggaatcgtacgaagtaatactacgcattacgtcgacaagagtatgacgtctctcaataagaagattaacgatttccatgtctacattatatggggttactctaaatcgcttgtttagataatacgcctctaatatagggctgacgtcgtatactctacacgtgtccacatcctttattaataataatttaacaatctctatatctatggttgagaaagaccagtagtattggatgggtaaagatcctccttcgtctctgccatggatggaaacattgttatcgatcaaacatttaattacatccttggatagagattgagattctctatgagacgatatatagtaatgaagagagttcttacacatatcactgtcgtacatacaggtacgaaatacgtaaccggtgctgtaacattctgatttaagaagccatagcaatacttctggtctcggattaggcgtcgttacgtatatatccaccaatccgagaccattgattgcataattcgtattcttggacggacgtatccgtttatccacaattaggtattttagcagacgtaagtcgatattatccgaatacagatcgaaatcatttatattcgacttgagttcgttagaggaatttgaatagctggatatcagtagatgcacaatctgagattttacgtatctatgcttactgtatgctcctagcggagttaatccttcgttgtttctacaaagtctctcgactccgcgagagagtaacagccgaacaatcttaatgtctgtatcgcatttattgaagacgtaacaatgtagcgcattgtttcctcgtctatctatatgttttgataagttgtgacacgtttcaatctctggttttatttttttgtacgtcacatcttcatccagtagacgacatagaatagtgcactctctaccacaataatccatagctattctggtgctaattattcctatttcacgaaggcaatcattcctcataagatgataaaaagtgtagtggagatttagtatttagcagtgcggatatgatccaagagggtgagatagtcgttctcgttcagaatctttcgcagcataagtagtatgtcgatatacttatcgttgaagactctttataaaagtctatttgtttatatttattgcggatagcagtatttccctataaaaagtatacgtcctgtggtgtctttaatcatgtacatgaatggatggtttatgtagaccttcgtacgatataccatcgaaaagttaatcgtaaatactcctgtaacggccgatgcttctgtatactcctcattaacatctataaacgtcgtatgtagaaatttttctacagtgatagtttcattacacatcttgctaaaatctgcataatatccgaatatattagtaagtcctaaattttctaaaatcggtaccagattatacggttctgtcatttccactttaaactttggcatatacaagtctatacttttagtagataacataccacaccattttttaaatttttcatctgttatatttttttctatgttatatataccttctatgtcgtccggtagtataattaccatactagagtttccctcgtatggaatatcgataatagagaatcctccgaataattcattaatatgtacatattgcaagttattctcggtacccaccatcatatcaacgctggtaactatattcttagaaatataaaacttgtctgtatatgtaagatgtttagaaaatggatatttccacattgctttaaaatggacggcgctaacaactgtcatacgagtattaatggatagcggactagtcaataaggaattaattttaccatttgtcattgtcttaacccattcgttgattagttcctttgtttggttagcattattaaagtttacagtttgaaaatcgtcttttattttttgtaggaaggaggcgtggaactcgatactatcgctaccgtatattttatttgcggtagctagtgtcgcacaatacggaatatctacctccatgtcatcattattgtcatcgggtgtattctcattcatattctctatatattttgatagttgttcagctgtagaaccagctgctccatgatttagaatagataaagtagataaaatggaaactggagaaatcaaaacattttcatcagggtgttttaagattagttctttaaagatatccatggtatagacctaacgataacgatatatatcataaataaataatgttaaatttcaatttatgtttgtaccccgtattcatacttaacaaattggtattgcgtacacaatcaatcatattacataccattaataatgcaagcataaaaaattgttagtagatgtttctaaatataggttccgtaagcaaagaatataagaatgaagcggtaatgataaaatcaatcgttatctaaaatgatcatactcatttattttattctattatattaacacatacatttttaacagcaacacattcaatattgtattgttatttttatattatttacacaattaacaatatattattagtttatattactgaattaataatataaaattcccaatcttgtcataaacacagaatccatcaaaaatgttgataaattatctgatgttgttgttcgctgctatgataatcagatcattcgccgatagtggtaacgctatcgaaacgacattgccagaaattacaaacgctacaacagatattccagctatcagattatgcggtccagagggagatggatattgtttacacggtgactgtatccacgctagagatatcgacggtatgtattgtagatgctctcatggttatacaggcattagatgtcagcatgtagtattagtagactatcaacgttcagaaaacccaaacactacaacgtcatatatcccatctcccggtattatgcttgtattagtaggcattattatgtgttgtctattatctgtttataggttcactcgacgaactaaactacctatacaagatatggttgtgccataatttttataaatttttttatgagtatttttacaaaaatgtataaagtgtatgtcttatgtatatttataaaaatgctaagtatgcgatgtatctatgttatttgtatttatctaaacaatacctctacctctagatattatacaaaaattttttatttcggcatattaaagtaaaatctagttaccttgaaaatgaatacagtgggtggttccgtatcaccagtaagaacataatagtcaaatacagtatccgattgagattttgcatacaatactagtctagaaagaaatttgtaatcatcttctgtgacgggagtccatatatctgtatcatcgtctagtttatcagtgtcccatgctatattcctgttatcatcattagttaatgaaaataactctcgtgcttcagaaaagtcaaatattgtatccatacatacatctccaaaactatcgcttatacgtttatctttaacgatacctatacctagatggttatttactaacagacattttccagatctattgactataactcctatagtttccacatcaaccaagtaatgatcatctattgttatataacaataacataactcttttccatttttatcagtatgtatatctatatcaacgtcgtcgttgtagtgaatagtagtcattgatctattatatgaaacggatatgtctagaacggcaattgttttacgtccagttaacactttcgttgatttaaagtctagagtctttgcaaacataatatccttatccgactttatatttcctgtagggtggtataattttattttgcctccacatatcggtgtttccaaatatattactagacaatattccatatagttattagttaagggtacccaattagaacacgtacgcttattatcatcatttggatcgtatttcataaaagttattgtgttatcgatgtcaacacattctacattttttaatcgtctatatagtatttttctgatattttctataatatcagaattgtcttccatcggaagttgtatactatcggaatcagttacatgtttaaataattctctgatgtcattccttatacaatcaaattcattattaaacagtttaatagtctgtagacctttatcgtcgtaaatatccattgtcttattagttacgcttatttttatgtgtttttacgttgctttattatattttataagaatgattgtttgacgaatcacgagaactattaagacacattattaggtatatattataaaaaagtttttgattacgatgttataagaggaaagaggacacattaacatcatacatcaattaactacattcttataacatcgtaatcaaaagaattgcaattttgatgtataacaactgtcaatgggttatggaattgtatattacatattatacggtatgttggtaacgacaaataccggtcggtaattgtctgccggtgtaatagaattatatatatctatctattacaccggccttgtatacataataataagttgtggtagtatgatctccatatttataatttaggactttgtattcagtatttttggaatcataaaaaataaaaaaaagttttactaatttaaaatttaaaaagtatttacatttttttcactgtttagtcgcggatatggaattcgatcctgccaaaatcaatacatcatctatagatcatgtaacaatattacaatacatagatgaaccaaatgatataagactaacagtatgcattatccgaaatattatatcaatatcacaaaaataaatacacatttggctaatcaatttcgggcttggaaaaaacgtatcgccggaagggactatatgactaacttatctagagatacaggaatacaacaatcaaaacttactgaaactatacgtaactgtcaaaaaaatagaaacatatatggtctatatatacactacaatttagttattaattggataaccgatgtgattatcaatcaatattaagagggttggtaaattggtacatagctaataatacctatacacccaataatacaacaaccatttctgagttggatatcatcaaaatactaaataaatacgaggacgtgtatagagtaagtaaagaaaaagaatgtggaatttgctatgaagttgtttactcaaaacgatagatactttggtttattggattcgtgtactcatatattttgcataacatgcatcaatatatggcatagaacacgaagagaaaccggtgcgtcggataattgtcctatatgccgtacccgttttagaaacataacaatgagcaagttctataagctagttaactaataaataaaaagtttaatttgttgacgacgtatgtcgttattttttctcgtataaaagattaatttgattctaatataatctttagtattggataaatatcaattcaaattaattccattagattatatcataaataaaaatagtagcacgcactacttcagccaaatattcttttttgaaacgccatctatcgtagtgaggacacaagtgaacctataattatcaaatttattagtatcagtcacatgaaggactttacgtagagtgacgattccactatctgtggtacgaacggtttcatcttctttgatgccatcacccagatgttctataaacttggtatcctcgtccgatctcatatcctttgccaaccaatacatgtagctaaaattaggcataaatttcacacatcctgaacaatgaaattctccagaagatgttacaatgtctagatttggacatttggtttcaaccgcgttaacatatgagtgaacacacccatacatgaaagcgatgagaaataggattctcatcttgccaaaatatcactagaaaaaatttatttatcagttttaaaggtataaaaaatacttattgttgctcgaatattttgtatttgatggtatacggaagattagaaatgtaggtattatcatcaactgattctatggttttatgtattctatcatgtttcactattgcgttggaaataatatcatacgcttccacatatattttattttgttttaactcataatactcacgtaattctggattattggcatatctatgaataattttagctccatgatcagtaaatattaatgagaacatagtattaccacctaccattatttttttcatctcattcaattcttaattgcaaagatctatataatcattatagcgttgacttatggactctggaatcttagacgatgtacagtcatctataatcatggcatatttaatacattgttttatagcatagtcgttatctacgatgttagatatttctctcaatgaatcaatcacacaatctaatgtaggtttatgacataatagcattttcagcagttcaatgtttttagattcgttgatggcaatggctatacatgtatatccgttatttgatctaatgttgacatctgaaccggattctagcagtaaagatactagagattgtttattatatctaacagccttgtgaagaagtgtttctcctcgtttgtcaatcatgttaatgtctttaagataaggtaggcaaatgtttatagtactaagaattgggcaagcataagacatgtcacaaagacccttttttgtatgtataagtgtaaaaattataacatccatagttggatttacataggtgtccaatcgggatctctccatcatcgagataattgatggcatctcccttccttttttagtagatatttcatcgtgtaagaatcaatattaatatttctaaagtatccgtgtatagcctctttatttaccacagctccatattccactagagggatatcgccgaatgtcatatactcaattagtatatgttggaggacatccgagttcattgttttcaatatcaaagagatggtttccttatcatttctccatagtggtacaatactacacattattccgtgcggctttccattttccaaaaacaatttgaccaaatctaaatctacatctttattgtatctataatcactatttagataatcagccataattcctcgagtgcaacatgttagatcgtctatatatgaataagcagtgttatctattcctttcattaacaatttaacgatgtctatatctatatgagatgacttaatataatattgaagagctgtacaatagtttttatctataaaagacggcttgattccgtgattaattagacatttaacaacttccggacgcacatatgctctcgtatccgactctgaatacagatgagagatgatatacagatgcaatacggtaccgcaatttcgtagttgataatcatcatacgcgtatcagtactcgtcctcataaagaacactgcagccattttctatgaacaaatcaataattttagaaacaggatcattgtcattacataattttctataactgaacgatggttttcacatttaacactcaagtcaaatccatgttctaccaacacctttatcaagtcaacgtctacatttttggatttcatatagctgaatatattaaagttatttatgttgctaaatccagtggcttctagtagagccatcgctatatccttattaactttaacatgtctactatttgtgtattcttctaatggggtaagctgtctccaatttttgcgtaatggattagtgccactgtctagtagtagtttgacgacctcgacattattacaatgctcattaaaaaggtatgcgtgtaaagcattattcttgaattggttcctggtatcattaggatctctgtctttcaacatctgtttaagttcatcaagagccacctcctcattttccaaatagtcaaacattttgactgaatgagctactgtgaactctatacacccacacaactaatgtcattaaatatcatgtcaaaaacttgtacaattattaataaaaataatttagtgtttaaattttaccagttccagattttacacctccgttaatacctccattaaccccactggacgatcctcctccccacattccaccgccaccagatgtataagttttagatcctttattactaccatcatgtccatggataaagacactccacatgccgccactaccccctttagaagacatattaataagacttaaggacaagtttaacaataaaattaatcacgagtaccctactaccaacctacactattatatgattatagtttctatttttacagtaccttgactaaagtttctagtcacaagagcaatactaccaacctacactattatatgattatagtttctatttttataggaacgcgtacgagaaaatcaaatgtctaatttctaacggtagtgttgataaacgattgttatccgcggatacctcctctatcatgtcgtctattttcttactttgttctattaacttattagcattatatattatttgattataaaacttatattgcttattagcccaatctgtaaatatcggattattaacatatcgtttctttgtaggtttatttaacatgtacatcactgtaagcatgtccttaccatttattttaatttgacgcatatccgcaatttctttttcgcagtcggttataaattctatatatgatggatacatgctacatgtgtacttataatcgactaatatgaagtacttgatacatattttcagtaacgatttattattaccacctatgaataagtacctgtgatcgtctaggtaatcaactgttttcttaatacattcgatggttggtaatttactcagaataatttccaatatcttaatatataattctgctatttctgggatatatttatctgccagtataacacaaatagtaatacatgtaaacccatattttgttattatattaatgtctgcgccattatctattaaccattctactaggctgacactatgcgactcaatacaatgataaagtatactacatccatgtttatctattttgtttatatcatcaatatacggcttacaaagttttagtatcgataacacatccaactcacgcatagagaaggtagggaataatggcataatatttattaggttatcatcattgtcattatctacaactaagtttccattttttaaaatatactcgacaactttaggatctctattgccaaatttttgaaaatatttatttatatgcttaaatctatataatgtagctccttcatcaatcatacatttaataacattgatgtatactgtatgataagatacatattctaacaatagatcttgtatagaatctgtatatcttttaagaattgtggatattaggatattattacataaactattacacaattctaaaatataaaacgtatcacggtcgaataatagttgatcaactatataattatcgattttgtgatttttcttcctaaactgtttacgtaaatagttagatagaatattcattagttcatgaccactatagttactatcgaataacgcgtcaaatatttcccgtttaatatcgcatttgtcaagataataatagagtgtggtatgttcacgataagtataataacgcatctctttttcgtgtgaaattaaatagtttattacgtccaaagatgtagcataaccatcttgtgacctagtaataatataataatagagaactgttttacccattctatcatcataatcagtggtgtagtcgtaatcgtaatcgtctaattcatcatcccaattataatattcaccagcacgtctaatctgttctattttgatcttgtatccatactgtatgttgctacatgtaggtattcctttatccaataatagtttaaacacatctacattgggatttgatgttgtagcgtatttttctacaatattaataccatttttgatactatttatttctatacctttcgaaattagtaatttcaataagtctatattgatgttatcagaacatagatattcgaatatatcaaaatcattgatatttttatagtcgactgacgacaataacaaaatcacaacatcgtttttgatattattatttttcttggtaacgtatgcctttaatggagtttcaccatcatactcatataatggatttgcaccactttctatcaatgattgtgcactgctggcatcgatgttaaatgttttacaactatcatagagtatcttatcgttaaccatgattggttgttgatgctatcgcattttttggtttctttcatttcagttatgtatggatttagcacgtttgggaagcatgagctcatatgatttcagtactgtagtgtcagtactattagtttcgatcagatcaatgtctagatctatagaatcaaaacacgataggtcagaagataatgaatatctgtaggcttcttgttgtactgtaacttctcgttttgttagatggttgcatcgtgctttaacatcaatggtacaaattttatcctcgctttgtgtatcatattcgtccctactataaaattgtatattcagattatcatgagatgtgtatacgctaacggtatcaataaacggagcacaccatttagtcataaccgtaatccaaaaatttttaaagtatatcttaacgaaagaagttgtgtcattgtctacggtgtatggtactagatcctcataagtgtatatatctagagtaatgtttaatttattaaatggttgataatatggatcctcatgacaatttcctaagacgaaaataagacataaacacgcaataaatctaatcgaagacatggttactccttaaaaaaatacgaataatcaccttggctatttagtaagtgtcatttaacactatactcatattaatccatggactcataatctctatacgggattaacggatgttctatatacggggatgagtagttctcttctttaactttatactttttactaatcatatttagactgatgtatgggtaatagtgtttgaagagctcgttctcatcatcagaataaatcaatatctctgtttttttgttatacagatgtattacagcctcatatattacgtaatagaacgtgtcatctaccttattaactttcaccgcatagttgtttgcaaatacggttaatcctttgacctcgtcgatttccgaccaatctgggcgtataatgaatctaaactttaatttcttgtaatcattcgaaataatttttagtttgcatccgtagttatcccctttatgtaactgtaaatttctcaacgcgatatctccattaataatgatgtcgaattcgtgctgtatacccatactgaatggatgaacgaataccgacggcgttaatagtaatttactttttcatctttacatattgggtactagttttactatcataagtttataaattccacaagctactatggaataagccaaccatcttagtataccacacatgtcttaaagtttattaattaattacatgttgttttatatatatcgctacgaatttaaagagaaattagtttaggaaaaaaaattatctatctacatcatcacgtctctgtattctacgatagagtgctactttaagatgcgacagatctgtgtcatcaaatatatactccattaaaatgattattccggcagcgaacttgatattggatatatcacaacctttgttaatatctacgacaatagacagcagtcccatggttccataaacagtgagtttatctttctttgaagagatattttgtagagatcttataaaactgtcgaatgacatcgcatttatatctttagctaaatcgtatatgttaccatcgtaatatctaaccgcgtctatcttaaacgtttccatcgctttaaagacgtttccgatagatggtctcatttcatcagtcatactgagccaacaaatataatcgtgtataacatctttgatagaatcagactctaaagaaaacgaatcggctttattatacgcattcatgataaacttaatgaaaaatgtttttcgttgtttaagttggatgaatagtatgtcttaataattgttattatttcattaattaatatttagtaacgagtacactctataaaaacgagaatgacataactaatcataactagttatcaaagtgtctaggacgcgtaattttcatatggtatagatcctgtaagcattgtctgtattctggagctattttctctatcgcattagtgagttcagaatatgttataaatttaaatcgaataacgaacataactttagtaaagtcgtctatattaactcttttattttctagccatcgtaataccatgtttaagatagtatattctctagttactacgatctcatcgttgtctagaatatcacatactgaatctacatccaattttagaaattggtctgtgttacatatctcttctatattattgttgatgtattgtcgtagaaaactattacgtagaccattttctttataaaacgaatatatagtactccaattatctttaccgatatatttgcacacataatccattctctcaatcactacatctttaagattttcgttgttaagatatttggctaaactatataattctattagatcatcaacagaatcagtatatatttttctagatccaaagacgaactctttggcgtcctctataatattcccagaaaagatattttcgtgttttagtttatcgagatctgatctgttcatatacgccatgattgtacggtacgttatgataaccgcataaaataaaaatccattttcatttttaaccaatactattcataattgagattgatgtaatactttgttactttgaacgtaaagacagtacacggatccgtatctccaacaagcacgtagtaatcaaatttggtgttgttaaacttcgcaatattcatcaatttagatagaaacttatactcatcatctgttttaggaatccatgtattattaccactttccaacttatcattatcccaggctatgtttcgtccatcatcgttgcgcagagtgaataattcttttgtattcggtagttcaaatatatgatccatgcatagatcggcaaagctattgtagatgtgatttttcctaaatctaatataaaactcgtttactagcaaacactttcctgatttatcgaccaagacacatatggtttctaaatctatcaagtggtggggatccatagttatgacgcagtaacatatattattacattcttgactgtcgctaatatctaaatatttattgttatcgtattggattctgcatatagatggcttgtatgtcaaagatatagaacacataaccaatttatagtcgcgctttacattctcgaatctaaagttaagagatttagaaaacattatatcctcggatgatgttatcactgtttctggagtaggatatattaaagtctttacagatttcgtccgattcaaataaatcactaaataatatcccacattatcatctgttagagtagtatcattaaatctattatattttatgaaagatatatcactgctcacctctatatttcgtacatttttaaactgtttgtataatatctctctgatacaatcagatatatctattgtgtcggtagacgataccgttacatttgaattaatggtgttccattttacaacttttaacaagttgaccaattcatttctaatagtatcaaactctccatgattaaatattttaatagtatccattttatatcactacggacacaaagtagctgacataaaccattgtataatttttatgttttatgtttattagcgtacacattttggaagttccggcttccatgtatttcctggagagcaagtagatgatgaggaaccagatagtttatatccgtacttgcacttaaagtctacattgtcgttgtatgagtatgatcttttaaacccgctagacaagtatccgtttgatattgtaggatgtggacatttaacaatctgacacgtgggtggatcggaccattctcctcctgaacacaggacactagagttaccaatcaacgaatatccactattgcaactataagttacaacgctcccatcggtataaaaatcctcgtatccgttatgtcttccgttggatatagatggaggggattggcatttaacagattcacaaataggtgcctcgggattccataccatagatccagtagatcctaattcacaatacgatttagattcaccgatcaactgatatccgctattacaagagtacgttatactagagccaaagtctactccaccaatatcaagttggccattatcgatatctcgaggcgatgggcatctccgtttaatacattgattaaagagtgtccatccagtacctgtacatttagcatatataggtcccattttttgctttctgtatccaggtagacatagatattctatagtgtctcctatgttgtaattagcattagcatcagtctccacactattcttaaatttcatattaatgggtcgtgacggaatagtacagcatgatagaacgcatcctattcccaacaatgtcaggaacgtcacgctctccaccttcatatttatttatccgtaaaaatgttatcctggacatcgtacaaataataaaaagcccatatatgttcgctattgtagaaattgtttttcacagttgctcaaaaacgatggcagtgacttatgagttacgttacactttggagtctcatctttagtaaacatatcataatattcgatattacgagttgacatatcgaacaaattccaagtatttgattttggataatattcgtattttgcatctgctataattaagatataatcaccgcaagaacacacgaacatctttcctacatggttaaagtacatgtacaattctatccatttgtcttccttaactatatatttgtatagataattacgagtctcgtgagtaattccagtaattacatagatgtcgccgtcgtactctacagcataaactatactatgatgtctaggcatgggagacttttttatccaacgatttttagtgaaacattccacatcgtttaatactacatatttctcatacgtggtataaactccacccattacatatatatcatcgtttacgaataccgacgcgcctgaatatctaggagtaattaagtttggaagtcttatccatttcgaagtgccgtgtttcaaatattctgccacacccgttgaaatagaaaattctaatcctcctattacatataactttccatcgttaacacaagtactaacttctgattttaacgacgacatattagtaaccgttttccattttttcgttttaagatctacccgcgatacggaataaacatgtctattgttaatcatgccgccaataatgtatagacaattatgtaaaacatttgcattatagaattgtctatctgtattaccgactatcgtccaatattctgttctaggagagtaatgggttattgtggatatataatcagagtttttaatgactactatattatgttttataccatttcgtgtcactggctttgtagatttggatatagttaatcccaacaatgatatagcattgcgcatagtattagtcataaacttgggatgtaaaatgttgatgatatctacatcgtttggatttttatgtatccactttaataatatcatagctgtaacatcctcatgatttacgttaacgtcttcgtgggataagatagttgtcagttcatcctttgataattttccaaattctggatcggatgtcaccgcagtaatattgttgattatttctgacatcgacgcattatatagttttttaattccatatcttttagaaaagttaaacatccttatacaatttgtgaaattaatattatgaatcatagtttttacacatagatctactacaggcggaacatcaattattatggcagcaactagtatcatttctacattgtttatggtgatgtttatcttcttccagcgcatatagtctaatagcgattcaaacgcgtgatagtttataccattcaatataatcgcttcatcctttagatggtgatcctgaatgcgtttaaaaaaattatacggagacgccgtaataatttccttattcacttgtataatttccccattgatagaaaatatcacgctttccattcttaaagtactataagtaattatagtataatgtaaacgtttatatattcaatatttttataaaaatcattttgacattaattcctttttaaatttccgtctatcatctatagaaacgtattctatgaatttataaaatgcttttacgtgtcctatcgtaggcgatagaaccgctaaaaagcctatcgaatttctacaaaagaatctgttatatggtatagggagagtataaaacattaaatgtccgtacttattaaagtattcagtagccaatcctaactctttcgaatacttattaatggctcttgttctgtacgaatctatttttttgaacaacggacctagtggtatatcttgttctatgtatctaaaataatgtctgactagatccgttagtttaatatccgcagtcatcttgtctagaatggcaaatctaactgcgggtttaggctttagtttagtttctatatctacatctatgtctttatctaacaccaaaaatataatagctaatattttattacaatcatccggatattcttctacgatctcactaactaatgtttctttggttatactagtatagtcactatcggacaaataaagaaaatcagatgatcgatgaataatacatttaaattcatcatctgtaagatttttgagatgtctcattagaatattattagggttagtactcattatcattcggcagctattacttattttattatttttcaccatatagatcaatcattagatcatcaaaatatgtttcaatcatcctaaagagtatggtaaatgactcttcccatctaatttctgaacgttcaccaatgtctctagccactttggcactaatagcgatcattcgcttagcgtcttctatattattaactggttgattcaatctatctagcaatggaccgtcggacagcgtcattctcatgttcttaatcaatgtacatacatcgccgtcatctaccaattcatccaacaacataagctttttaaaatcatcattataataggtttgatcgttgtcatttctccaaagaatatatctaataagtagagtcctcatgcttagttaacaactattttttatgttaaatcaattagtacaccgctatgtttaatacttattcatattttagtttttaggattgagaatcaatacaaaaattaatgcatcattaattttagaaatacttagtttccacgtagtcaatgaaacatttgaactcatcgtacaggacgttctcgtacaggacgtaactataaaccggtttatatttgttcaagatagatacaaatccgataactttttttacgaattctacgggatccactttaaaagtgtcataccgggttctttttatttttttaaacagatcaatggtgtgatgttgattaggtcttttacgaatttgatatagaatagcgtttacatattctccataatggtcaatcgccatttgttcgtatgtcataaattctttaattatatgacactgtgtattgtttagttcatccttgttcattgttaggaatctatccaaaatggcaattatactagaactataggtgcgttgtatacacatattgatgtgtctgtttatacaatcaatgctactaccttcgggtaaaattgtagcatcatataccatttctagtactttaggttcattattatccattgcagaggacgtcatgatcgaatcataaaaaaatatattatttttatgttattttgttaaaaataatcatcgaatacttcgtaagatactccttcatgaacataatcagttacaaaacgtttatatgaagtaaagtatctacgatttttacaaaagtccggatgcataagtacaaagtacgcgataaacggaataataatagatttatctagtctatctttttctatagctttcatagttagatacatggtctcagaagtaggattatgtaacatcagcttcgataaaatgactgggttatttagtcttacacattcgctcatacatgtatgaccgttaactacagagtctacactaaaatgattgaacaatagatagtctaccattgtttcgtattcagatagtacagcgtagtacatggcatcttcacaaattatatcattgtctaatagatatttgacgcatcttatggatcccacttcaacagccatcttaaaatcggtagaatcatattgctttcctttatcattaataatttctagaacatcatctctatcataaaagatacaaatattaactgtttgatccgtaataacattgctagtcgatagcaatttgttaataagatgcgctgggctcaatgtcttaataagaagtgtaagaggactatctccgaatttgttttgtttattaacatccgttgatggaagtaaaagatctataatgtctacattcttgactgttttagagcatacaatatggagaggtgtatttccatcatgatctggttttgagggactaattcctagtttcatcatccatgagattgtagaagcttttggattgtctgacataagatgtctatgaatatgatttttgccaaatttatccactatcctggcttcgaatccgatggacattatttttttaaacactctttctgaaggatctgtacacgccaacaacggaccacatccttcttcatcaaccgagttgttaatcttggctccatactgtaccaataaatttattctctctatgacttcatcatctgttcccgagagataatatagaggcgttttatgctgtttatcacacgcgtttggatctgcgccgtgcgtcagcagcatcgcgactattctattattattaattttagaagctatatgcaatggataatttccatcatcatccgtctcatttggagagtatcctctatgaagaagttcttcgacaaatcgttcatctagtcctttaattccacaatacgcatgtagaatgtgataattatttccagaaggttcgatagcttgtagcatattcctaaatacatctaaatttttactattatatttggcataaagagatagataatactcggccgacataatgttgtccattgtagtataaaaattaatatttctatttctgtatatttgcaacaatttactctctataacaaatatcataacttagttcttttatgtcaagaaggcactggtttagttcatctataaatgtcacgccataactaccacgcatgccatactcagaattatgataaagatatttatccttggggtgtaggtaatggggattaatctttgttggatcagtctctaagttaacacatgtcacacatgatccatttatagttatatcacacgatgatgatttatgaattgattccggaagatcgctatcgtattttgtggttccacaattcatttccatacatgttattgtcacactaatattatgatgaactttatctagccgctgagtggtaaacaacagaacagatagtttattatctttaccaacaccctcagccgctgccacaaatctctgatccgtatccatgatggtcatgtttatttctagtccgtatccagtcaacactatgttagcatttctgtcgatatagctttcactcatatgacactcaccaataatagtagaattaatgtcgtaatttacaccaatagtgagttcggcggcaaagtaccaataccggtaatcttgtcgaggaggacatatagtattcttgtattctaccgaatacccgagagatgcgatacaaaagagcaagactaatttgtaaaccatcttactcaaaatatgtaacaatagtacgatgcaatgagtaagacaataggaaatctatcttatatacacataattattctatcaattttaccaattagttagtgtaatgttaacaaaaatgtgggagaatctaattagtttttctttacacaattgacgtacatgagtctgagttccttgtttttgctaattatttcatccaatttattattcttgacgatatcgagatcttttgtataggagtcaaacttgtattcaacatgcttttctataatcattttagctatttcggcatcatccaatagtacattttccagattagcagaatagatattaatgtcgtatttgaacagagcctgtaacatctcaatgtctttattatctatagccaatttaatgtccggaatgaagagaagggaattattggtgtttgtcgacgtcatatagtcgagcaagagaatcatcatatccacgtgtccattttttatagtgatgtgaatacaactaaggagaatagccagatcaaaagtagatggtatctctgaaagaaagtaggaaacaatacttacatcattaagcatgacggcatgataaaatgaagttttccatccagttttcccatagaacatcagtctccaatttttcttaacaaacagttttaccgtttgcatgttaccactatcaaccgcataatacaatgcggtgtttcccttgtcatcaaattgtgaatcatccagtccactgaatagcaaaatctttactattttggtatcttccaatgtggctgcctgatgtaatggaaattcattctctagaagatttttcaatgctccagcgttcaacaacgtacatactagacgcacgttattatcagctattgcataatacaaggcactatgtccatggacatccgccttaaatgtatctttactagagagaaagcttttcagctgcttagacttccaagtattaattcgtgacagatccatgtctgaaacgagacgctaattagtgtatattttttcattttttataattttgtcatattgcaccagaattaataatatctttaatagatctgattagtagatacatggctatcgcaaaacaacatatacacatttaataaaaataatatttattaagaaaattcagatttcacgtacccatcaatataaataaaataatgattccttacaccgtacccatattaaggagattccaccttacccataaacaatataaatccagtaatatcatgtctgatgatgaacacaaatggtgtattaaattccagtttttcaggagatgatctcgccgtagctaccataatagtagatgcctctgctacagttccttgttcgtcgacatctatctttgcattctgaaacattttataaatatataatgggtccctagtcatatgtttaaacgacgcattatctggattaaacatactaggagccatcatttcggctatcgacttaatatccctcttattttcgatagaaaatttagggagtttaagattgtacactttattccctaattgagacgaccaatagtctaattttgcagccgtgatagaatctgtgaaatgggtcatattatcacctattgccaggtacatactaatattagcatccttatacggaaggcgtaccatgtcatattctttgtcatcgattgtgattgtatttccttgcaatttagtaactacgttcatcatgggaaccgttttcgtaccgtacttattagtaaaactagcattgcgtgttttagtgatatcaaacggatattgccatatacctttaaaatatatagtattaatgattgcccatagagtattattgtcgagcatattagaatctactacattagacataccggatctacgttctactatagaattaattttattaaccgcatctcgtctaaagtttaatctatataggccgaatctatgatattgttgataatacgacggtttaatgcacacagtattatctacgaaactttgataagttagatcagtgtacgtatatttagatgttttcagcttagctaatcctgatattaattctgtaaatgctggacccagatctctttttctcaaatccatagtcttcaataattctattctagtattacctgatgcaggcaatagcgacataaacatagaaaacgaataaccaaacggtgagaagacaatattatcatcttgaatatttttatacgctactataccggcattggtaaatccttgtagacgataggcggacgctgaacacgctaacgatagtatcaataacgcaatcatgattttatggtattaataattaaccttatttttatgttcggtataaaaaaattattgatgtctacacatccttttgtaattgacatctatatatccttttgtataatcaactctaatcactttaacttttacagttttccctaccagtttatccctatattcaacatatctatccatatgcatcttaacactctctgccaagatagcttcagagtgaggatagtcaaaaagataaatatatagagcataatcattctcgtatactctgccctttattacatcacccgcattgggcaacgaataacaaaatgcaagcatcttgttaacgggctcgtaaattgggataaaaattatgtttttattgtcttatatctattttattcaagagaatattcaggaatttctttttccggttgtatctcgtcgcagtatatatcatttgtacattgtttcatattttttaatagtttacaccttttagtaggactagtatcgtacaattcatagctgtattttgaattccaatcacgcataaaaatatcttccaattgttgacgaagacctaatccatcatccggtgtaatattaatagatgctccacatgtatccgtaaagtaatttcctgtccaatttgaggtacctatataggccgttttatcggttaccatatatttggcatggtttaccctagaatacggaatgggaggatcagcatctggtacaataaatagctttacttctatatttatgtttttagattttagcatagcgatagatcttaaaaagtttctcatgataaacgaagatcgttgccagcaactaatcaatagcttaacggatacttgtctgtctatagcggatcttcttaattcatcttctatataaggccaaaacaaaattttacccgccttcgaataaataatagggataaagttcataacagatacataaacgaatttactcgcatttctaatacatgacaataaagcggttaaatcattggttctttccatagtacatagttgttgcggtgcagaagcaataaatacagagtgtggaacgccgcttacgttaatactaagaggatgatctgtattataatacgacggataaaagtttttccaattatatggtagattgttaactccaagataccagtatacctcaaaaatttgagtgagatccgctgccaagttcctattattgaagatcgcaatacccaattccttgacctgagttagtgatctccaatccatgttagcgcttcctaaataaatatgtgtattatcagatatccaaaattttgtatgaagaactcctcctaggatatttgtaatatctatgtatcgtacttcaactccggccatttgtagtctttcaacatcctttaatggtttgttagatttattaacggctactctaactcgtactcctcttttgggtaattgtacaatctcgtttaatattatcgtgccgaaattcgtacccacttcatccgataaactccaataaaaagatgatatatctagtgtttttgtggtattggatagaatttccctccacatgttaaatgtagacaaatatactttatcaaattgcatacctataggaatagtttctgtaatcactgcgattgtattatccggattcattttatttgttaaaagaataatcctatatcacttcactctattaaaaatccaagtttctatttctttcatgactgattttttaacttcatccgtttccttatgaagatgatgtttggcaccttcataaatttttatttctctattacaatttgcatgttgcatgaaataatatgcacctaaaacatcgctaatcttattgtttgttccctggagtatgagagtcgggggggtgttaatcttggaaattatttttctaaccttgttggtagccttcaagacctgactagcaaatccagccttaattttttcatgattgactaatgggtcgtattggtatttataaactttatccatatctctagatactgattctggacatagctttccgactggcgcatttggtgtgatggttcccataagtttggcagctagcagattcagtcttgaaacagcatctgcattaactagaggagacattagaatcattgctgtaaacaagtttggattatcgtaagaggctagctcccatggaatgacccaataagtagatttaatagttaccacgtgctgtaccaaagtcatcaatcatcattttttcaccattacttcttccatgtccaatatgatcatgtgagaatactaaaattcctaacgatgatatgttttcagctagttcgtcataacgtccagaatgtttaccagctccatgacttatgaatactaatgccttaggatatgtaataggtttccaatatttacaatatatgtaatcattgtccagattgaacatacagtttgcactcatgattcacgttatataactatcaatattaacagttcgtttgatgatcatattatttttatgttttattgataattgtaaaaacatacaattaaatcaatatagaggaaggagacggctactgtcttttgtgagatagtcatggcgactaaattagattatgaggatgctgttttttactttgtggatgatgataaaatatgtagtcgcgactccatcatcgatctaatagatgaatatattacgtggagaaatcatgttatagtgtttaacaaagatattaccagttgtggaagactgtacaaggaattgatgaagttcgatgatgtcgctatacggtactatggtattgataaaattaatgagattgtcgaagctatgagcgaaggagaccactacatcaattttacaaaagtccatgatcaggaaagtttattcgctaccataggaatatgtgctaaaatcactgaacattggggatacaaaaagatttcagaatctagattccaatcattgggaaacattacagatttgatgaccgacgataatataaacatcttgatactttttctagaaaaaaaattgaattgatgatataggggtcttcataacgcataattattacgttagcattctatatccgtgttaaaaaaaattatcctatcatgtatttgagagttttatatgtagcaaacatgatagctgtgatgccaataagctttagatattcacgcgtgctagtgttagggatggtattatctggtggtgaaatgtccgttatataatctacaaaacaatcatcgcatatagtatgcgatagtagagtaaacatttttatagtttttactggattcatacatcgtctacccaattcggttataaatgaaattgtcgccaatcttacacccaaccccttgttatccattagcatagtattaacttcgttatttatgtcataaactgtaaatgattttgtagatgccatatcatacatgatattcatgtccctattataatcattactaactttatcacaatatatgttgataatatctatatatgatctagtctttgtgggcaactgtctatacaagtcgtctaaacgttgtttactcatatagtatcgaacagccatcattacatggtcccgttccgttgatagataatcgagtatgttagtggacttgtcaaatctatataccatattttctggaagtggatatacatagtcgtgatcaacattattgctagcctcatcttctatatcctgtactataccattatctatatcatctacataatctatgatattattacacataaacatcgacaacatactattgtttattatctaagtcctgttgatccaaacccttgatctcctctatttgtactatctagagattgtacttcttccagttctggataatatatacgttgatagattagctgagctattctatctccagtatttacattaaacgtacattttccattattaataagaatgactcctatgtttcccctataatcttcgtctattacaccacctcctatatcaatgccttttagtgacagaccagacctaggagctattctaccatagcaaatcttaggcatggacatactaatatctgtcttaattaactgtctttctcctggagggatagtataatcgtaagcgctatacaaatcatatccggcagcacccggcgattgcctagtaggagatttagctctgttagtttccttaacaaatctaactggtgagttaatattcatgttgaacataaaactaatattttatttcaaaattatttaccatcccatatattccatgaataagtgtgatgattgtacacttctatagtatctatatacgattcacgataaaatcctcctatcaatagcagtttattatccactatgatcaattctggattatccctcggataaataggatcatctatcagagtccatgtattgctggattcacaataaaattccgcatttctaccaaccaagaataaccttctaccgaacactaacgcgcatgatttataatgaggataataagtggatggtccaaactgccactgatcatgattgggtagcaaatattctgtagttgtatcagtttcagaatgtcctcccattacgtatataacattgtttatggatgccactgctggattacatctaggtttcagaagactcggcatattaacccaagcagcatccccgtggaaccaacgctcaacagatgtgggatttggtagacctcctactacgtataatttattgttagcgggtatcccgctagcatacagtctggggctattcatcggaggaattggaatccaattgtttgatatataatttaccgctatagcattgttatgtatttcattgttcatccatccaccgatgagatatactacttctccaacatgagtacttgtacacatatggaatatatctataatttgatccatgttcataggatactctatgaatggatacttgtatgatttgcgtggttgtttatcacaatgaaatattttggtacagtctagtatccattttacattatttatacctctgggagaaagataatttgacctgattacatttttgataaggagtagcagatttcctaatttatttcttcgctttatataccacttaatgacaaaatcaactacataatcctcatctggaacatttagttcatcgctttctagaataagtttcatagatagataatcaaaattgtctatgatgtcatcttccagttccaaaaagtgtttggcaataaagtttttagtatgacataagagattggatagtccgtattctatacccatcatgtaacactcgacacaatattcctttctaaaatctcgtaagataaagtttatacaagtgtagatgataaattctacagaggttaatatagaagcacgtaataaattgacgacgttatgactatctatatatacctttccagtatacgagtaaataactatagaagttaaactgtgaatgtcaaggtctagacaaaccctcgtaactggatctttatttttcgtgtatttttgacgtaaatgtgtgcgaaagtaaggagataactttttcaatatcgtagaattgactattatattgcctcctatggcatcaataattgttttgaatttcttagtcatagacaatgctaatatattcttacagtacacagtattgacaaatatcggcatttatgtttctttaaaagtcaacatctagagaaaaatgattatctttttgagacataactcccattttttggtattcacccacacgtttttcgaaaaaattagtttttccttccaatgatatattttccatgaaatcaaacggattggtaacattataaatttttttaaatcccaattcagaaatcaatctatccgcgacgaattctatatatgttttcatcatttcacaattcattcctataagtttaactggaagagccgcagtaagaaattcttgttcaatggatactgcatctgttataatagatctaacggtttcttcactcggtggatgcaataaatgtttaaacatcaaacatgcgaaatcgcagtgcagaccctcgtctctactaattagttcgttggaaaacgtgagtccgggcattaggccacgctttttaagccaaaatatggaagcgaatgatccggaaaagaagattccttctactgcagcaaaggcaataagtctctctccataaccggcgctgtcatgtatccacttttgagcccaatcggccttcttttttacacaaggcatcgtttctatggcattaaagagatagtttttttcattactatctttaacataagtatcgatcaaaagactatacatttccgaatgaatgttttcaatggccatctgaaatccgtagaaacatctagcctcggtaatctgtacttctgtacaaaatcgttccgccaaattttcattcactattccgtcactggctgcaaaaaacgccaatacatgttttataaaatatttttcgtctggtgttagtttattccaatcattgatatctttagatatatctacttcttccactgtccaaaatgatgcctctgcctttttatacatgttccagatgtcataatattggattgggaaaataacaaatctatttggatttggtgcaaggatgggttccataactaaattaacaatatcaataaattttttttcagttatctatatgcctgtacttggattttttgtacatcgatatcgccgcaatcactacaataattacaagtattattgatagcattgttattagtactatcataattaaattatctacattcatgggtgctgaataatcgttattatcatcattatcattttgtaattgtgacatcatactagataaatcgtttgcgagattgttgtgggaagcgggcatggaggatgcattatcattattatttaacgccttccatttggattcacaaatgttacgcacattcaacattttatggaaactataattttgtgaaaacaaataacaagaaaactcgtcatcgttcaaatttttaacgatagtaaaccgattaaacgtcgagctaatttctaacgctagcgactctgttggatatgggtttccagatatatatcttttcagttcccctacgtatctataatcatctgtaggaaatggaagatatttccatttatctactgttcctaatatcatatgtggtggtgtagtagaaccattaagcgcgaaagatgttatttcgcatcgtattttaacttcgcaataatttctggttagataacgcactctaccagtcaagtcaatgatattagcctttacagatatattcatagtagtcgtaacgatgactccatcttttagatgcgatactcctttgtatgtaccagaatcttcgtacctcaaactcgatatatttaaacaagttaatgagatattaacgcgttttatgaatgatgatatataaccagaagttttatcctcggtggctagcgctataaccttatcattataataccaactagtgtgattaatatgtgacacgtcagtgtgggtacaaatatgtacattatcgtctacgtcgtattcgatacatccgcatacagccaacaaatataaaatgacaaatactctaacgccgttcgtacccatcttgatgcggtttaataaatgttttgatttcaatttattgtaaaaaaagattcggttttatactgttcgatattctcattgcttatattttcatctatcatctccacacagtcaaatccgtggttagcatgcacctcatcaaccggtaaaagactatcggactcttctatcattataactctagaatatttaatttggtcattattaatcaagtcaattatcttatttttaacaaacgtgagtattttactcattttttataaaaacttttagaaatatacagactctatcgtgtgtctatatcttctttttatatccaatgtatttatgtctgatttttcttcatttatcatatataatggtccaaattctacacgtgcttcggattcatccagatcattaaggttcttataattgtaacatccttctcttccctcttctacatcttccttcttattcttattcttagcgtcacagaatctaccacagcaggatcccatgacgagcgtcatattaaactaatccattttcaattataatatatgattagtaatgaccattaaaataaaaaatattcttcataaccggcaagaaagtgaaaagttcacattgaaactatgtcagtagtatacatcatgaaatgatgatatatatatactctattttggtggaggattatatgatataattcgtggataatcatttttaagacacatttctttattcgtaaatcttttcacgttaaatgagtgtccatattttgcaatttcttcatatgatggcggtgtacgtggacgaggctgctcctgttcttgttgtggtcgccgactgtcgtgtctgcgtttagatccctccattatcgcgattgcgtagatggagtactattttataccttgtaattaaatttttttattaattaaacgtataaaaacgttccgtatctgtatttaagagccagatttcgtctaatagaacaaatagctacagtaaaaataactagaataattgctacacccactagaaaccacggatcgtaatacggcaatcggttttcgataataggtggaacgtatattttatttaaggacttaacaattgtctgtaaaccacaatttgcttccgcggatcctgtattaactatctgtaaaagcatatgttgaccgggcggagccgaacattctccgatatctaatttctgtatatctataatattattaacctccgcatacgcattacagttcttttctagcttggataccgcactaggtacatcgtctagatctattcctatttcctcagcgatagctcttctatccttttccggaagcaatgaaatcacttcaataaatgattcaaccatgagtgtgaaactaagtcgagaattactcatgcatttgttagttattcggagcgcgcaatttttaaactgtcctataacctctcctatatgaatagcacaagtgacattagtagggatagaatgttgagctaatttttgtaaataactatctataaaaagattatacaaagttttaaactctttagtttccgccatttatccagtctgagaaaatgtctctcataataaatttttccaagaaactaattgggtgaagaatggaaacctttaatctatatttatcacagtctgttttggtacacatgatgaattcttccaatgccgtactaaattcgatatctttttcgatttctggatatgtttttaataaagtatgaacaaagaaatggaaatcgtaataccagttatgtttaactttgaaattgttttttattttcttgttaatgattccagccacttgggaaaagtcaaagtcgtttaatgccgatttaatacgttcattaaaaacaaactttttatcctttagatgaattattattggttcattggaatcaaaaagtaagatattatcgggtttaagatctgcgtgtaaaaagttgtcgcaacagggtagttcgtagattttaatgtataacagagccatctgtaaaaagataaactttatgtattgtaccaaagatttaaatcctaatttgatagctaactcggtatctactttatctgccgaatacagtgctaggggaaaaattataatgtttcctctttcatattcgtagttagttctcttttcatgttcgaaaaagtgaaacatgcggttaaaatagtttataacattaatattactgttaataactgccggataaaagtgggatagtaatttcacgaatttgatactgtcctttctctcgttaaacgcctttaaaaaaactttagaagaatatctcaatgagagttcctgaccatccatagtttgtatcaataatagcaacatatgaagaacacgtttatacagagtatgtaaaaatgttaatttatagtttaatcccatggcccacgcacacacgattaattttttttcatctccctttagattgttgtatagaaatttgggtactgtgaactccgccgtagtttccatgggactatataattttgtggcctcgaatacaaattttactacatagttatctatcttaaagactataccatatcctcctgtagatatgtgataaaaatcgtcgtttataggataaaatcgtttatccttttgttggaaaaaggatgaattaatgtaatcattctcttctatctttagtagtgtttccttattaaaattcttaaaataatttaacaatctaactgacggagcccaattttggtgtaaatctaattgggacattatattgttaaaatacaaacagtctcctaatataacagtatctgataatctatggggagacatccattgatattcaggggatgaatcattggcaacacccatttattgtacaaaaagccccaatttacaaacgaaagtccaggtttgatagagacaaacaattaactattttgtctctgtttttaacacctccacagtttttaatttctttagtaatgaaattattcacaatatcagtatcttctttatctaccagagattttactaacttgataaccttggctgtctcattcaatagggtagtaatatttgtatgtgtgatattgatatctttttgaattgtttcttttagaagtgattctttgatggtgccagcatacgaattacaataatgcagaaactcggttaacatgcaggaattatagtaagccaattccaattgttgcctgtgttgtattagagtgtcaatatgagcaatggtgtccttgcgtttctctgatagaatgcgagcagcgattttggcgttatcatttgacgatatttctggaatgacgaatcctgtttctactaactttttggtaggacaaagtgaaacaatcaagaagatagcttctcctcctatttgtggaagaaattgaactcctctagatgatctactgacgatagtatctccttgacagatattggaccgaattacagaagtacctggaatgtaaagccctgaaaccccctcattttttaagcagattgttgccgtaaatcctgcactatgcccaagatagagagctcctttggtgaatccatctctatgtttcagtttaaccaagaaacagtcagctggtctaaaatttccatctctatctaatacagcatctaacttgatgtcaggaactatgaccggtttaatgttatatgtaacattgagtaaatccttaagttcataatcatcactgtcatcagttatgtacgatccaaacaatgtttctaccggcatagtggatacgaagatgctatccatcagaatgtttccctgattagtattttctatatagctattcttctttaaacgattttccaaatcagtaactatgttcatttttttaggagtaggacgcctagccagtatggaagaggattttctagatcctctcttcaacatctttgatctcgatggaatgcaaaaccccatagtgaaacaaccaacgataaaaataatattgtttttcactttttataattttaccatctgactcatggattcattaatatctttataagagctactaacgtataattctttataactgaactgagatatatacaccggatctatggtttccataattgagtaaatgaatgctcggcaataactaatggcaaatgtatagaacaacgaaattatactagagttgttaaagttaatattttctatgagctgttccaataaattatttgttgtgactgcgttcaagtcataaatcatcttgatactatccagtaaaccgtttttaagttctggaatattatcatcccattgtaaagcccctaattcgactatcgaatatcctgctctgatagcagtttcaatatcgacggacgtcaatactgtaataaaggtggtagtattgtcatcatcgtgataaactacgggaatatggtcgttagtaggtacggtaactttacacaacgcgatatataactttccttttgtaccatttttaacgtagttgggacgtcctgcagggtattgttttgaagaaatgatatcgagaacagatttgatacgatatttgttggattcctgattattcactataatataatctagacagatagatgattcgataaatagagaaggtatatcgttggtaggataatacatccccattccagtattctcggatactctattgatgacactagttaagaacatgtcttctattctagaaaacgaaaacatcctacatggactcattaaaacttctaacgctcctgattgtgtctcgaatgcctcgtacaaggatttcaaggatgccatagattctttgaccaacgatttagaattgcgtttagcatctgatttttttattaaatcgaatggtcggctctctggtttgctaccccaatgataacaatagtcttgtaaagataaaccgcaagaaaatttatacgcatccatccaaataaccctagcaccatcggatgatattaatgtattattatagattttccatccacaattattgggccagtatactgttagcaacggtatatcgaatagattactcatgtaacctactagaatgatagttcgtgtactagtcataatatctttaatccaatctaaaaaatttaaaattagattttttacactgttaaagttaacaaaagtattacccgggtacgtggatatcatatatggcattggtccattatcagtaatagctccataaactgatacggcgatggtttttatatgtgtttgatctaacgaggaagaaattcgcgcccacaattcatctctagatatgtatttaatatcaaacggtaacacatcaatttcgggacgcgtatatgtttctaaatttttaatccaaatataatgatgacctatatgccctattatcatactgtcaactatagtacacctagggaacttacgatacatctgtttcctataatcgttaaattttacaaatctataacatgctaaaccttttgacgacagccattcattaatttctgatatggaatctgtattctcgataccgtatcgttctaaagccagtgctatatctccctgttcgtgggaacgctttcgtataatatcgatcaacggataatctgaagtttttggagaataatatgactcatgatctatttcgtccataaacaatctagacataggaattggaggcgatgatcttaattttgtgcaatgagtcgtcaatcctataacttctaatcttgtaatattcatcatcgacataatactatctatgttatcatcgtatattagtataccatgaccttcttcatttcgtgccaaaatgatatacagtcttaaatagttacgcaatatctcaatagtttcataattgttagctgttttcatcaaggtttgtatcctgtttaacatgatggcgttctataacgtctctattttctatttttaattttttaaatttttaacgatttactgtggctagatacccaatctctctcaaatatttttttagcctcgcttacaagctgtttatctatactattaaaactgacgaatccgtgattttggtaatgggttccgtcgaaatttgccgaagtgatatgaacatattcgtcgtcgactatcaacaattttgtattattctgaatagtgaaaaccttcacagatagatcattttgaacacacaacgcatctagacttttggcggttgccatagaatatacgtcgttcttatcccaattaccaactagaagtctgatcttaactcctctattaatggctgcttctataatggagttgtaaatgtcgggccaatagtagctattaccgtcgacacgtgtagtgggaactatggccaaatgttcaatatctatactagtcttagctgacctgagtttatcaataactacatcggtatctagatctctagaatatcccaataggtgttccggagaatcagtaaagaacactccacctataggattcttaatatgatacgcagtgctaactggcaaacaacaagccgcagagcataaattcaaccatgaattttttgcgctattaaaggctttaaaagtatcaaatcttctacgaagatctgtggccagcgggggataatcagaatatacacctaacgttttaatcgtatgtatagatcctccagtaaatgacgcgtttcctacataacatctttcatcatctgacacccaaaaacaaccgagtagtagtcccacattattttttttatctatattaacggttataaaatttatatccgggcagtgactttgtagctctcccagatttcttttccctcgttcatctagcaaaactattattttaatcccttttttagatgcctcttttagtttatcaaaaataagcgctcccctagtcgtactcagaggattacaacaaaaagatgctatgtatatatatttcttagctagagtgataatttcgttaaaacattcaaatgttgttaaatgatcggatctaaaatccatattttctggtagtgtttctaccagcctacattttgctcccgcaggtaccgatgcaaatggccacatttagttaacataaaaacttatacatcctgttctatcaacgattctagaatatcatcggctatatcgctaaaattttcatcaaagtcgacatcacaacctaactcagtcaatatattaagaagttccatgatgtcatcttcgtctatttctatatccgtatccattgtagattgttgaccgattatcgagtttaaatcattactaatactcaatccttcagaatacaatctgtatttcattgtaaatttataggcggtgtatttaagttggtagattttcaattatgtatcaatatagcaacagtagttcttgctcctccttgattctagcatcctcttcattattttcttctacgtacataaacatgtccaatacgttagacaacacaccgacgatggcggccgctacagacacgaatatgactagaccgatgaccatttaaaaacccctctctagctttcacttaaactgtatcgatcattcttttagcacatgtataatataaaaacattattctatttcgaatttaggcttccaaaaatttttcatccgtaaaccgataataatatatatagacttgttaatagtcggaataaatagattaatgcttaaactatcatcatctccacgattagagatacaatatttacattctttttgctgtttcgaaactttatcaatacacgttaatacaaacccaggaaggagatattgaaactgaggctgttgaaaatgaaacggtgaatacaataattcagataatgtaaaatcatgattccgtattctgatgatattagaactgctaatggatgtcgatggtatgtatctaggagtatctattttaacaaagcatcgatttgctaatatacaattatcattttgattaattgttattttattcatattcttaaaaggtttcatatttatcaattcttctacattaaaaatttccatttttaatttatgtagccccgcaatactcctcattacgtttcattttttgtctataatatccattttgttcatctcggtacatagattatccaattgagaagcgcatttagtagttttgtacattttaagtttattgacgaatcgtcgaaaactagttatagttaacattttattatttgataccctgatattaatacccctgccgttactattatttataactgatgtaacccacgtaacattagaattaattatcgatagtaatgcatcaacgcttccaaaattgtctattataaactcaccgataatttttttattgcatgttttcatattcattaggattatcaaatctttaatcttattacgattgtatgcgttgatattacaagacgtcattctaaaagacggaggatttccatcaaatgccagacaatcacgtacaaagtacatggaaataggttttgttctattgcgcatcatagatttatatagaacacccgtagaaatactaatttgttttactctataaaatactaatgcatctatttcatcgttttgtataacgtctttccaagtgtcaaattccaaatttttttcattgatagtaccaaattcttctatctctttaactacttgcatagataggtaattacagtgatgcctacatgccgttttttgaaactgaatagatgcgtctagaagcgatgctacgctagtcacaatcaccactttcatatttagaatatatatatgtaaaaatatagtagaatttcattttgttttttctatgctataaatgaattctcattttgcatctgctcatactccgttttatatcaataccaaagaaggaagatatctggttctaaaagccgttaaagtatgcgatgttagaactgtagaatgcgaaggaagtaaagcttcctgcgtactcaaagtagataaaccctcatcacccgcgtgtgagagaagaccttcgtccccgtccagatgcgagagaatgaataaccctggaaaacaagttccgtttatgagaacggacatgctacaaaatatgttcgcggctaatcgcgataatgtagcttctagacttttgtcctaaaatacaattatatccttttcgatattaataaatccgtgtcgtccaggttttttatctctttcagtatgtgaatagataggtattttatctctattcatcatcgaatttaagagatccgataaacattgtttgtattctccagatgtcagcatctgatacaacaatatatgtgcacataaacctctggcacttatttcatgtaccttccccttatcactaaggagaatagtatttgagaaatatgtatacatgatattatcatgaattagatatacagaatttgtaacactctcgaaatcacacgatgtgtcggcgttaagatctaatatatcactcgataacacattttcatctagatacactagacattttttaaagctaaaatagtctttagtagtaacagtaactatgcgattattttcatcgatgatacatttcatcggcatattattacgcttaccatcaaagactataccatgtgtatatctaacgtattctagcatggttgccatacgcgcattaaacttttcaggatctttggatagatcttccaatctatctatttgagaaaacatttttatcatgttcaatagttgaaacgtcggatccactatatagatattatctataaagattttaggaactacgttcatggtatcctggcgaatattaaaactatcaatgatatgattatcgttttcatcttttatcaccatatagtttctaagatatgggattttacttaatataatattatttcccgtgataaattttattagaaaggccaaatctataagaaaagtcctagaattagtctgaagaatatctatatcgccgtatagtatatttggattaattagatatagagaatatgatccgtaacatatacaacttttattatggcgtctaagatattcttccatcaacttattaacatttttgactagggaagatacattatgacgtcccattacttttgccttgtctattactgcgacgttcatagaatttagcatatctcttgccaattcttccattgatgttacattataagaaattttagatgaaattacatttggagctttaatagtaagaactcctaatatgtccgtgtatgtggtcactaatacagattgtagttctataatcgtaaataatttacctatattatatgtttgagtctgtttagaaaagtagctaagtatacgatcttttatttctgatgcagatgtattaacatcggaaaaaaatctttttttattcttttttactaaagatacaaatatgtctttgttaaaaacagttattttctgaatatttctagcttgtaattttaacatatgatattcgttcacactaggtactctgcctaaataggtttctataatctttaatgtaatattaggaaaagtattctgatcaggattcctattcattttgaggatttaaaactctgattattgtctaatatggtctctacgcaaactttttcacagagcgatagagtttttgataactcgtttttcttaagaaatataaaactactgtttccagagctcgctctatcttttattttatctaattcgatacaaactcctgatactggttcagaaagtaattcattaattttcagtcctttatagaagatatttaatatagataatacaaaatcttcagtttttgatatcgatctgattgatcctagaactagatatattaataacgtgctcattaggcagtttatggcagcttgataattagatatagtatattccagttcatatttattagataccgcattgcccagattttgatattctatgaattcctctgaaaataaatccaaaataactagacattctattttttgtggattagtgtactctcttccctctatcatgttcactactggtgtccacgatgataaatatctagagggaatataatatagtccataggatgccaatctagcaatgtcgaataactgtaatttgattcttcgttcttcattatgaattgattcttgaggtataaacctaacacaaattatattattagacttttcgtatgtaatgtctttcatgttataagtttttaatcctggaatagaatctattttaatgaggcttttaaacgcagagttctccaacgagtcaaagcataatactctgttgtttttcttatatacgatgttacgattttcttctttgaatggaataggtttttgaattagtttataattacaacataatagataaggaagtgtgcaaatagtacgcggaaaaaacataatagctcccctgttttcatccatggttttaagtaaatgatcactggcttctttagtcaatggatattcgaacattaaccgtttcatcatcattggacagaatccatattttttaatgtaaagagtgatcaaatcattgtgtttattgtaccatcttgttgtaaatgtgtattcggttatcggatctgctcctttttctattaaagtatcgatgtcgatctcgtctaagaattcaactatatcgacatatttcatttgtatacacataaccattactaacgtagaatgtataggaagagatgtaacgggaacagggtttgttgattcgcaaactattctaatacataattcttctgttaatacgtcttgcacgtaatctattatagatgccaagatatctatataattattttgtaagatgatgttaactatgtgatctatataagtagtgtaataattcatgtatttcgatatatgttccaactctgtctttgtgatgtctagtttcgtaatatctatagcatcctcaaaaaatatattcgcatatattcccaagtcttcagttctatcttctaaaaaatcttcaacgtatggaatataataatctattttacctcttctgatatcattaatgatataatttttgacactatcttctgtcaattgattcttattcactatatctaagaaacggatagcgtccctaggacgaactactgccattaatatctctattatagcttctggacataattcatctattataccagaattaatgggaactattccgtatctatctaacatagttttaagaaagtcagaatctaagacctgatgttcatatattggttcatacatgaaatgatctctattgatgatagtgactatttcattctctgaaaattggtaactcattctatatatgctttccttgttgatgaaggatagaatatactcaatagaatttgtaccaacaaactgttctcttatgaatcgtatatcatcatctgaaataatcatgtaaggcatacatttaacaattagagacttgtctcctgttatcaatatactattcttgtgataatttatgtgtgaggcaaatttgtccacgttctttaattttgttatagtagatatcaaatccaatggagctacagttcttggcttaaacagatatagtttttctggaacaaattctacaacattattataaaggactttgggtagataagtgggatgaaatcctattttaattaatgcgatagccttgtcctcgtgcagatatccaaacgcttttgtgatagtatggcattcattgtctagaaacgctctacgaatatctgtgacagatatcatctttagagaatatactagtcgcgttaatagtactacaatttgtattttttaatctatctcaataaaaaaattaatatgtatgattcaatgtataactaaactactaactgttattgataactagaatcagaatctaatgatgacgtacccaagaagtttatctactgccaatttagctgcattatttttagcatctcgtttagattttccatctgccttatcgaatactcttccgtcgatatctacacaggcataaaatgtaggagagttactaggcccaactgattcaatacgaaaagaccaatctctcttagttatttggcagtactcattaataacggtgacagggttagcatctttccaatcaataatttttttagccggaataacatcatcaaaagacttatgatcctctctcattgatttttcgcgggatacatcatctattatgacgtcagccataacatcagcatccggcttatccgcctccgttgtcataaaccaacgaggaggaatatcgtcggagctgtacaccatagcactacgttgaagatcgtacagagctttattaacttctcgcttctccatattaagttgtctagttagttgtgcagcagtagctccttcgattccaatggttttaatagcctcacacacaatctctgcgttagaacgttcgtcgatatagattttagacatttttagagagaactaacacaaccagcaataaaactgaacctactttatcatttttttattcatcatcctctggtggttcgtcgttcctatcaaatgtagctctgattaacccgtcatctataggtgatgctggttctggagattctggaggagatggattattatctggaagaatctctgttatttccttgttttcatgtatcgattgcgttgtaacattaagattgcgaaatgctctaaatttgggaggcttaaagtgttgtttgcaatctctacacgcgtgtctaactagtggaggttcgtcagctgctctagtttgaatcatcatcggcgtagtattcctacttttacagttaggacacggtgtattgtatttctcgtcgagaacgttaaaataatcgttgtaactcacatcctttattttatctatattgtattctactcctttcttaatgcattttataccgaataagagatagcgaaggaattctttttcggtgccgctagtacccttaatcatatcacatagtgttttatattccaaatttgtggcaatagacggtttatttctatacgatagtttgtttctggaatcctttgagtattctataccaatattattctttgattcgaatttagtttcttcgatattagattttgtattacctatattcttgatgtagtactttgatgatttttccatggcccattctattaagtcttccaagttggcatcatccacatattgtgatagtaattctcggatatcagtagcggctaccgccattgatgtttgttcattggatgagtaactactaatgtatacattttccatttataacacttatgtattaactttgttcatttatattttttcattattatgttgatattaacaaaagtgaatatatatatatgttaataattgtattgtggttatacggctacaattttataatgagtgaaagtcagtgtccgatgatcaatgacgatagctttactctgaaaagaaagtatcaaatcgatagtgcggagtcaacaataaaaatggataagaagaggataaagtttcagaatagagccaaaatggtaaaagaaataaatcagacaataagagcagcacaaactcattacgagacattgaaactaggatacataaaatttaagagaatgattaggactactactctagaagatatagcaccatctattccaaataatcagaaaacttataaactattctcggacatttcagccatcggcaaagcatcacagaatccgagtaagatggtatatgctctgctgctttacatgtttcccaatttgtttggagatgatcatagattcattcgttatagaatgcatccaatgagtaaaatcaaacacaagatcttctctcctttcaaacttaatcttattagaatattagtggaagaaagattctataataatgaatgcagatctaataaatggaaaataattggaacacaagttgataaaatgttgatagctgaatctgataaatatacaatagatgcaaggtataacctaaaacccatgtatagaatcaagggagaatctgaagaagataccctcttcatcaaacagatggtagaacaatgtgtgacatcccaggaattggtggaaaaagtgttgaagatactgtttagagatttgttcaagagtggagaatacaaagcgtacagatacgatgatgatgtagaaaatggattcattggattggatacactaaaattaaacattgttcatgatatagttgaaccatgtatgcctgttcgtaggccagtggctaagatactgtgtaaagaaatggtaaataaatactttgagaatccgctacatattattggtaaaaatcttcaagagtgcattgactttgttagtgaataggcatttcatctttctccaatactaattcaaattgttaaattaataatggatagtataaatagttattagttataagatagtaaaaataattattagaataagagtgtagtatcatagataactctcttctataaaaatggattttattcgtagaaagtatcttatatacacagtagaaaataatatagattttttaaaggatgatacattaagtaaagtaaacaattttaccctcaatcatgtactagctctcaagtatctagttagcaattttcctcaacatgttattactaaggatgtattagctaataccaatttttttgttttcatacatatggtacgatgttgtaaagtgtacgaagcggttttacgacacgcatttgatgcacccacgttgtacgttaaagcattgactaagaattatttatcgtttagtaacgcaatacaatcgtacaaggaaaccgtgcataaactaacacaagatgaaaaatttttagaggttgccgaatacatggacgaattaggagaacttataggcgtaaattatgacttagttcttaatccattatttcacggaggggaacccatcaaagatatggaaatcatttttttaaaactgtttaagaaaacagacttcaaagttgttaaaaaattaagtgttataagattacttatttgggcatacctaagcaagaaagatacaggcatagagtttgcggataatgatagacaagatatatatactctatttcaacaaactggtagaatcgtccatagcaatctaacagaaacgtttagagattatatctttcccggagataagactagctattgggtgtggttaaacgaaagtatagctaatgatgcggatatcgttcttaatagacccgccattaccatgtatgataaaattcttagttatatatactctgagataaaacaaggacgcgttaataaaaacatgcttaagttagtttatatctttgagcctgaaaaagatatcagagaacttctgctagaaatcatatatgatattcctggagatatcctatctattattgatgcaaaaaacgacgattggaaaaaatattttattagtttttataaagctaattttattaacggtaatacatttattagtgatagaacgtttaacgaggacttattcagagttgttgttcaaatagatcccgaatatttcgataatgaacgaattatgtctttattctctacgagtgctgcggacattaaacgatttgatgagttagatattaataacagttatatatctaatataatttatgaggtgaacgatatcacattagatacaatggatgatatgaagaagtgtcaaatctttaacgaggatacgtcgtattatgttaaggaatacaatacatacctgtttttgcacgagtcggatcccatggtcatagagaacggaatactaaagaaactgtcatctataaaatccaagagtagacggctgaacttgtttagcaaaaacattttaaaatattatttagacggacaattggctcgtctaggtcttgtgttagatgattataaaggagacttgttagttaaaatgataaaccatcttaagtctgtggaggatgtatccgcattcgttcgattttctacagataaaaaccctagtattcttccatcgctaatcaaaactattttagctagttataatatttccatcatcgtcttatttcaaaggtttttgagagataatctatatcatgtagaagaattcttggataaaagcatccatctaaccaagacggataagaaatatatacttcaattgataagacacggtagatcatagaacagaccaaatatattattaataatttgtatatacatagatataattatcacacatttttgataaatgggaactgctgcaacaattcagactcccaccaaattaatgaataaagaaaatgcagaaatgattttggaaaaaattgttgatcatatagttatgtatattagtgacgaatcaagtgattcagaaaataatcctgaatatattgattttcgtaacagatacgaagactatagatctctcattataaaaagtgatcacgagtttgtaaagctatgtaaaaatcatgcggagaaaagttctccagaaacgcaacaaatgattatcaaacacatatacgaacaatatcttattccagtatctgaagtactattaaaacctataatgtccatgggtgacataattacatataacggatgtaaagacaatgaatggatgctagaacaactctctaccctaaactttaacaatctccgcacatggaactcatgtagcataggcaatgtaacgcgtctgttttatacattttttagttatctgatgaaagataaactaaatatataagtataatcccattctaatactttaacctgatgtattagcatcttattagaatattaacctaactaaaagacataacataaaaactcattacatagttgataaaaagcggtaggatataaatattatggctgccaccgttccgcgttttgacgacgtgtacaaaaatgcacaaagaagaattctagatcaagaaacattttttagtagaggtctaagtagaccgttaatgaaaaacacatatctatttgataattacgcgtatggatggataccagaaactgcaatttggagtagtagatacgcaaacttagatgcaagtgactattatcccatttcgttgggattacttaaaaagttcgagtttctcatgtctctatataaaggtcctattccagtatacgaagaaaaagtaaatactgaattcattgctaatggatctttctccggtagatacgtatcatatcttagaaagttttctgctcttccaacaaacgagtttattagttttttgttactgacttccattccaatctataatatcttgttctggtttaaaaatactcagtttgatattactaaacacacattattcagatacgtctatacagataatgccaaacacctggcgttggctaggtatatgtatcaaacaggagactataagcctttgtttagtcgtctcaaagagaattatatatttaccggtcccgttccaatatgtatcaaagatatagatcaccctaatcttagtagagcaagaagtccatccgattatgagacattagctaatattagtactatattgtactttaccaagtatgatccggtattaatgtttttattgttttacgtacctgggtattcaattactacaaaaattactccagccgtagaatatctaatggataaactgaatctaacaaagagcgacgtacaactgttgtaaattattttatgcttcgtaaaatgtaggttttgaaccaaacattctttcaaagaatgagatgcataaaactttattatccaatagattgactatttcggacgtcaatcgtttaaagtaaacttcgtaaaatattctttgatcactgccgagtttaaaacttctatcgataattgtctcatatgttttaatatttacaagttttttggtccatggtacattagccggacaaatatatgcaaaataatatcgttctccaagttctatagtttctggattatttttattatattcagtaaccaaatacatattagggttatctgcggatttataatttgagtgatgcattcgactcaacataaataattctagaggagacgatctactatcaaattcggatcgtaaatctgtttctaaagaacggagaatatctatacatacctgattagaattcatccgtccttcagacaacatctcagacagtctggtcttgtatgtcttaatcatattcttatgaaacttggaaacatctcttctagtttcactagtacctttattaattctctcaggtacagattttgaattcgacgatgccgagtatttcatcgttgtatatttcttcttcgattgcataatcagattcttatataccgcttcaaactctattttaaaattattaaacaatactctattattaatcagtcgttctaactctttcgctatttctatagacttatcgacatcttgactgtctatctctgtaaacacggagtcggtatctccatacacgctacgaaaacgaaatctgtaatctataggcaacgatgttttcacaatcggattaatatctctatcgtccatataaaatggattacttaatggattggcaaaccgtaacataccgttagataactctgctccatttagtaccgattctagatacaagatcattctacgtcctatggatgtgcaactcttagccgaagcgtatgagtatagagcactatttctaaatcccatcagaccatatactgagttggctactatcttgtacgtatattgcatggaatcatagatggccttttcagttgaactggtagcctgttttagcatctttttatatctggctctctctgccaaaaatgttcttaatagtctaggaatggttccttctatcgatctatcgaaaattgctatttcagagatgaggttcggtagtctaggttcacaatgaaccgtaatatatctaggaggtggatatttctgaagcaatagctgattatttatttcttcttccaatctattggtactaacaacgacaccgactaatgtttccggagatagatttccaaagatacacacattaggatacagactgttataatcaaagattaatacattattactaaacattttttgttttggagcaaataccttaccgccttcataaggaaacttttgttttgtttctgatctaactaagatagttttagtttccaacaatagctttaacagtggacccttgatgactgtactcgctctatattcgaataccatggattgaggaagcacatatgttgacgcacccgcgtctgtttttgtttctactccataatactcccacaaatactgacacaaacaagcatcatgaatacagtatctagccatatctaaagctatgtttagattataatccttatacatctgagctaaatcaacgtcatcctttccgaaagataatttatatgtatcattaggtaaagtaggacataatagtacgactttaaatccattttcccaaatatctttacgaattactttacatataatatcctcatcaacagtcacataattacctgtggttaaaacctttgcaaatgcagcggctttgcctttcgcgtctgtagtatcgtcaccgatgaacgtcatttctctaactcctctatttaatactttacccatgcaactgaacgcgttcttggatatagaatccaatttgtacgaatccaatttttcaaatttttgaatgaatgaatatagatcgaaaaatatagttccattattgttattaacgtgaaacgtagtattggccatgccgcctactcccttatgactagactgatttctctcataaatacagagatgtacagcttcctttttgtccggagatctaaagataatcttctctcctgttaataactctagacgattagtaatatatctcagatcaaagttatgtccgttaaaggtaacgacgtagtcgaacgttagttccaacaattgtttagctattcgtaacaaaactatttcagaacatagaactagttctcgttcgtaatccatttccattagtgactgtatcctcaaacatcctctatcgacggcttcttgtatttcctgttccgttaacatctcttcattaatgagcgtaaacaataatcgtttaccacttaaatcgatataacagtaacttgtatgcgagattgggttaataaatacagaaggaaacttcttatcgaagtgacactctatatctagaaataagtacgatcttgggatatcgaatctaggtatttttttagcgaaacagttacgtggatcgtcacaatgataacatccattgttaatctttgtcaaatattgctcgtccaacgagtaacatccgtctggagatatcccgttagaaatataaaaccaactaatattgagaaattcatccatggtggcattttgtatgctgcgtttctttggctcttctatcaaccacatatctgcgacggagcattttctatctttaatatctagattataacttattgtctcgtcaatgtctatagttctcatctttcccaacggcctcgcattaaatggaggaggagacaatgactgatatatttcgtccgtcactacgtaataaaagtaatgaggaaatcgtataaatacggtctcaccatttcgacatctggatttcagatataaaaatctgttttcaccgtgactttcaaaccaattaatgcaccgaacatccatttatagaatttagaaatatattttcatttaaatgaatcccaaacattggggaagagccgtatggaccattatttttatagtactttcgcaagcgggtttagacggcaacatagaagcgtgtaaacgaaaactatatactatagttagcactcttccatgtcctgcatgtagacggcacgcgactatcgctatagaggacaataatgtcatgtctagcgatgatctgaattatatttattattttttcatcagattatttaacaatttggcatctgatcccaaatacgcgatcgatgtgacaaaggttaaccctttataaacttaacccattataaaacttatgattagtcacaactgaaataaccgcgtgattattttttggtataattctacacggcatggtttctgtgactatgaattcaacccccgttacattagtgaaatctttaacaaacagcaagggttcgtcaaagacataaaactcattgtttacaatcgaaatagaccccctatcacacttaaaataaaaaatatccttatcctttaccaccaaataaaattctgattggtcaatgtgaatgtattcacttaacagttccacaaatttatttattaactccgaggcacatacatcgtcggtattttttatggcaaactttactcttccagcatccgtttctaaaaaaatattaacgagttccatttatatcatccaatattattgaaatgacgttgatggacagatgatacaaataagaaggtacggtacctttgtccaccatctcctccaattcatgctctattttgtcattaactttaatgtatgaaaacagtacgccacatgcttccatgacagtgtgtaacactttggatacaaaatgtttgacattagtataattgttcaagactgtcaatctataatagatagtagctataatatattctatgatggtattgaagaagatgacaaccttggcatattgatcatttaacacagacatggtatcaacagatagcttgaatgaaagagaatcagtaattggaataagcgtcttctcgatagagtgtccgtataccaacatgtctgatattttgatgtattccattaaattatttagttttttctttttattctcgttaaacagcatttctgtcaacggaccccaacatcgttgaccgattaagttttgattgatttttccgtgtaaggcgtatctagtcagatcgtatagcctatccaataatccatcatctgtgcgtagatcacatcgtacactttttaattctctatagaagagcgacagacatctggagcaattacagacagcaatttctttattctctacagatgtaagatacttgaagacattcctatgatgatgcagaattttggataacacggtattgatggtatctgttaccataattcctttgatggctgatagtgtcagagcacaagatttccaatctttgacaatttttagcaccattatctttgttttgatatctatatcagacagcatggtgcgtctgacaacacagggattaagacggaaagatgaaatgattctctcaacatcttcaatagataccttgctattttttctggcattatctatatgtgcgagaatatcctctagagaatcagtatcctttttgatgatagtggatctcaatgacatgggacgtttaaaccttcttattctatcaccagattgcatggtgatttgtcttctttcttttatcataatgtaatctctaaattcatcggcaaattgtctatatctaaaatcataatatgagatgtttacctctacaaatatctgttcgtccaatgttagagtatttacatcagttttgtattccaaattaaacatggcaacggatttaattttatattcctctattaagtcctcgtcgataataacagaatgtagataatcatttaatccatcgtacatggttggaagatgcttgttgacaaaatctttaattgtcttgatgaaggtgggactatatctaacatcttgattaataaaatttataacattgtccataggatactttgtaactagttttatacacatctcttcatcggtaagtttagacagaatatcgtgaacaggtggtatattatattcatcagatatacgaagaacaatgtccaaatctatattgtttaatatattatatagatgtagcgtagctcctacaggaatatctttaactaagtcaatgatttcatcaaccgttagatctattttaaagttaatcatataggcattgatttttaaaaggtatgtagccttgactacattctcattaattaaccattccaagtcactgtgtgtaagaagattatattctatcataagcttgactacatttggtcccgataccattaaagaattcttatgatataaggaaacagcttttaggtactcatctactctacaagaattttggagagccttaacgatatcagtgacgtttattatttcaggaggaaaaaacctaacattgagaatatcggaattaatagcttccagatacagtgattttggcaatagtccgtgtaatccataatccagtaacacgagctggtgcttgctagacaccttttcaatgtttaatttttttgaaataagctttgataaagccttcctcgcaaattccggatacatgaacatgtcggcgacatgattaagtattgttttttcattatttttatattttctcaacaagttctcaataccccaatagatgatagaatatcacccaatgcgtccatgttgtctatttccaacaggtcgctatatccaccaatagaagtttttccaaaaaagattctaggaacagttctaccaccagtaatttgttcaaaatagtcacgcaattcattttcgggtttaaattctttaatatcgacaatttcatacgctcctcttttgaaactaaacttatttagaatatccagtgcatttctacaaaaaggacatgtatacttgacaaaaattgtcactttgttattggccaacctttgttgtacaaattcctcggccattttaatatttaagtgatataaaactatctcgacttatttaactctttagtcgagatatatggacgcagatagctatatgatagccaactacagaaggcaaacgctataaaaaacataattacgacgagcatatttataaatatttttattcagcattacttgatatagtaatattaggcacagtcaaacattcaaccactctcgatacattaactctctcattttctttaacaaattctgcaatatcttcgtaaaaagattcttgaaactttttagaatatctatcgactctagatgaaatagcgttcgtcaacatactatgttttgtatacataaaggcgcccattttaacagtttctagtgacaaaatgctagcgatcctaggatcctttagaatcacatagattgacgattcgtctctcttagtaactctagtaaaataatcatacaatctagtacgcgaaataatattatccttgacttgaggagatctaaacaatctagttttgagaacatcgataagttcatcgggaatgacatacatactatctttaatagaactcttttcatccagttgaatggattcgtccttaaccaactgattaatgagatcttctattttatcattttccagatgatatgtatgtccattaaagttaaattgtgtagcgcttctttttagtctagcagccaatactttaacatcactaatatcgatatacaaaggagatgatttatctatggtattaagaattcgtttttcgacatccgtcaaaaccaattcctttttgcctgtatcatccagttttccatcctttgtaaagaaattattttctactagactattaataagactgataaggattcctccataattgcacaatccaaactttttcacaaaactagactttacaagatctacaggaatgcgtacttcaggttttttagcttgtgattttttcttttgcggacattttcttgtgaccaactcatctaccatttcattgattttagcagtgaaataagctttcaatgcacgggcactgatactattgaaaacgagttgatcttcaaattccgccatttaagttcaccaaacaacttttaaatacaaatatatcaatagtagtagaataagaactataaaaaaaataataattaaccaataccaaccccaacaaccggtattattagttgatgtgactgttttctcatcacttagaacagatttaacaatttctataaagtctgtcaaatcatcttccggagaccccataaatacaccaaatatagcggcgtacaacttatccatttatacattgaatattggcttttctttatcgctatcttcatcatattcatcatcaatatcaacaagtcccagattacgagccagatcttcttctacattttcagtcattgatacacgttcactatctccagagagtccgataacgttagccaccacttctctatcaatgattagtttcttgagcgcgaaagtaatttttgtttccgttccggatctatagaagacgataggtgtgataattgccttggccaattgtctttctcttttactgagtgattctagttcaccttctatagatctgagaatggatgattctccagtcgaaacatattctaccatggatccgtttaatttgttgatgaagatggattcatccttaaatgttttctctgtaatagtttccaccgaaagactatgcaaagaatttggaatgcgttccttgtgcttaatgtttccatagacggcttctagaagttgatacaacataggactagccgcggtaacttttatttttagaaagtatccatcgcttctatcttgtttagatttatttttataaagtttagtctctccttccaacataataaaagtggaagtcatttgactagataaactatcagtaagttttatagagatagacgaacaattagcgtattgagaagcatttagtgtaacgtattcgatacattttgcattagatttactaatcgattttgcatactctataacacccgcacaagtctgtagagaatcgctagatgcagtaggtcttggtgaagtttcaactctcttcttgattaccttactcatgattaaacctaaataattgtactttgtaatataatgatatatattttcactttatctcatttgagaataaaaatgtttttgtttaaccactgcatgatgtacagatttcggaatcgcaaaccaccagtggttttattttatccttgtccaatgtgaattgaatgggagcggatgcgggtttcgtacgtagatagtacattcccgtttttagaccgagactccatccgtaaaaatgcatactcgttagtttggaataactcggatctgctatatggatattcatagattgactttgatcgatgaaggctcccctgtctgcagccatttttatgatcgtcttttgtggaatttcccaaatagttttataaactcgcttaatatcttctggaaggtttgtattctgaatggatccaccatctgccataatcctattcttgatctcatcattccataattttctctcggttaaaactctaaggagatgcggattaactacttgaaattctccagacaatactctccgagtgtaaatattactggtatacggttccaccgactcattatttcccaaaatttgagcagttgatgcagtcggcataggtgccaccaataaactatttctaagaccgtatgttctgattttatcttttagaggttcccaattccaaagatccgacggtacaacattccaaagatcatattgtagaataccgttactggcgtacgatcctacatatgtatcgtatggtccttccttctcagctagttcacaactcgcctctaatgcaccgtaataaatggtttcgaagatcttcttatttagatcttgtgcttccaggctatcaaatggataatttaagagaataaacgcgtccgctaatccttgaacaccaataccgataggtctatgtctcttattagagatttcagcttctggaataggataataattaatatctataattttattgagatttctgacaattactttgaccacatccttcagtttgagaaaatcaaatcgcccatctattacaaacatgttcaaggcaacagatgccagattacaaacggctacctcattagcatccgcatattgtattatctcagtgcaaagattactacacttgatagttcctaaattttgttgattactctttttgttacacgcatccttataaagaatgaatggagtaccagtttcaatctgagattctataatcgctttccagacgactcgagcctttattatagatttgtatctcctttctctttcgtatagtgtatacaatcgttcgaactcgtctccccaaacattgtccaatccaggacattcatccggacacatcaacgaccactctccgtcatccttcactcgtttcataaagagatcaggaatccaaagagctataaatagatctctggttctatgttcctcgtttcctgtattctttttaagatcgaggaacgccataatatcagaatgccacggttccaagtatatggccataactccaggccgtttgtttcctccctgatctatgtatctagcggtgttattataaactctcaacattggaataataccgtttgatataccattggtaccggagatatagcttccactggcacgaatattactaattgatagacctattccccctgccattttagagattaatgcgcatcgttttaacgtgtcatagataccctctatgctatcatcgatcatgttaagtagaaaacagctagacatttggtgacgactagttcccgcattaaataaggtaggagaagcgtgcgtaaaccatttttcagaaagtagattgtacgtctcaatagctgagtctatatcccattgatgaattcctactgcgacacgcattaacatgtgctgaggtctttcaacgatcttgttgtttattttcaacaagtaggatttttccaaagttttaaaaccaaaatagttgtatgaaaagtctcgttcgtaaataataaccgagttgagtttatccttatatttgttaactatatccatggtgatacttgaaataatcggagaatgtttcccatttttaggattaacatagttgaataaatcctccatcacttcactaaatagtttttttgtttccttgtgtagatttgatacggctattctggcggctagaatggcataatccggatgttgtgtagtacaagtggctgctatttcggctgccagagtgtccaattctaccgttgttactccattatatattccttgaataaccttcatagctattttaataggatctatatgatccgtgtttaagccataacataattttctaatacgagacgtgattttatcaaacatgacattttccttgtatccatttcgtttaatgacaaacatttttgttggtgtaataaaaaaattatttaacttttcattaatagggatttgacgtatgtagcgtacaaaatgatcgttcctggtatatagataaagagtcctatatatttgaaaatcgttacggctcgattaaactttaatgattgcatagtgaatatatcattaggatttaactccttgactatcatggcggcgccagaaattaccatcaaaagcattaatacagttatgccgatcgcagttaaaacggttatagcatccaccatttatatctaaaaattagatcaaagaatatgtgacaaagtcctagttgtatactgagaattgacgaaacaatgtttcttacatatttttttcttattagtaactgacttaatagtaggaactggaaagctagacttgattattctataagtatagatacccttccagataatgttctctttgataaaagttccagaaaatgtagaattttttaaaaagttatcttttgctattaccaagattgtgtttagacgcttattattaatatgagtgatgaaatccacaccgcctctagatatcgcctttatttccacattagatggtaaatccaatagtgaaactatctttttaggaatgtatggactcgcgtttagaggagtgaacgtcttgggcgtcggaaaggatgattcgtcaaacgaataaacaatttcacaaatggatgttaatgtattagtaggaaattttttgacgctagtggaattgaagattctaatggatgatgttctacctatttcatccgataacatgttaatttccgacaccaacggttttaatatttcgatgatatacggtagtctctctttcggacttatatagcttattccacaatacgagtcattatatactccaaaaaacaaaataactagtataaaatctgtatcgaatgggaaaaacgaaattatcgacataggtatagaatccggaacattgaacgtattaatacttaattctttttctgtggtaagtaccgataggttattgacattgtatggttttaaatattctataacttgagacttgatagatattagtgatgaattgaaaattatttttatcaccacgtgtgtttcaggatcatcgtcgacgcccgtcaaccaaccgaatggagtaaaataaatatcattaatatatgctctagatattagtatttttattaatcctttgattatcatcttctcgtaggcgaatgattccatgatcaagagtgatttgagaacatcctccggagtattaatgggcttagtaaacagtccatcgttgcaataataaaagttatccaagttaaaggatattatgcattcgtttaaagatatcacctcatctgacggagacaattttttggtaggttttagagactttgaagctacttgtttaacaaagttattcatcgtcgtctactattctatttaattttgtagttaatttatcacatatcacattaattgactttttggtccatttttccatacgtttatattcttttaatcctgcgttatccgtttccgttatatccagggatagatcttgcaagttaaatagaatgctcttaaataatgtcattttcttatccgctaaaaatttaaagaatgtataaacctttttcagagatttgaaactcttaggtggtgtcctagtacacaatatcataaacaaactaataaacattccacattcagattccaacagctgattaacttccacattaatacagcctattttcgctccaaatgtacattcgaaaaatctgaataaaacatcgatgtcacaatttgtattatccaatacagaatgtttgtgattcgtgttaaaaccatcggagaaggaatagaaataaaaattattatagtggtggaattcagttggaatattgcctccggagtcataaaaggatactaaacattgttttttatcataaattacacatttccaatgagacaaataacaaaatccaaacattacaaatctagaggtagaacttttaattttgtctttaagtatatacgataagatatgtttattcataaacgcgtcaaatttttcatgaatcgctaaggagtttaagaatctcatgtcaaattgtcctatataatccacttcggatccataagcaaactgagagactaagttcttaatacttcgattgctcatccaggctcctctctcaggctctattttcatcttgacgacctttggattttcaccagtatgtattcctttacgtgataaatcatcgattttcaaatccatttgtgagaagtctatcgccttagatactttttcccgtagtcgaggtttaaaaaaatacgctaacggtatactagtaggtaactcaaagacatcatatatagaatggtaacgcgtctttaactcgtcggttaactctttcttttgatcgagttcgtcgctactattgggtctgctcaggtgccccgactctactagttccaacatcataccgataggaatacaagacactttgccggcggttgtagatttatcatatttttccactacatatccgttacaatttgttaaaaatttagatacatctatattgctacataatccagctagtgaatatatatgacataataaattggtaaatcctagttctggtattttactaattactaaatctgtatatctttccatttatcatggaaaagaatttaccagatatcttcttttttccaaactgcgttaatgtattctcttacaaatattcacaagatgaattcagtaatatgagtaaaacggaacgtgatagtttctcattggccgtgtttccagttataaaacatagatggcataacgcacacgttgtaaaacataaaggaatatacaaagttagtacagaagcacgtggaaaaaaagtatctcctccatcactaggaaaacccgcacacataaacctaaccgcgaagcaatatatatacagtgaacacacaataagctttgaatgttatagttttctaaaatgtataacaaatacagaaatcaattcgttcgatgagtatatattaagaggactattagaagctggtaatagtttacagatattttccaattccgtaggtaaacgaacagatactataggtgtactagggaataagtatccatttagcaaaattccattggcctcattaactcctaaagcacaacgagagatattttcagcgtggatttctcatagacctgtagttttaactggaggaactggagtgggtaagacgtcacaggtacccaagttattgctttggtttaattatttatttggtggattctctactctagataaaatcactgactttcacgaaagaccagtcattctatctcttcctaggatagctttagttagattgcatagcaataccattttaaaatcattgggatttaaggtactagatggatctcctatttctttacggtacggatctataccggaagaattaataaacaaacaaccaaaaaaatatggaattgtattttctacccataagttatctctaacaaaactatttagttatggcactcttattatagacgaagttcatgagcatgatcaaataggagatattattatagcagtagcgagaaagcatcatacgaaaatagattctatgtttttaatgactgccacgttagaggatgacagggaacggctaaaagtatttttacctaatcccgcatttatacatattcctggagatacactgtttaaaattagcgaggtatttattcataataagataaatccatcttccagaatggcatacatagaagaagaaaagagaaatttagttactgctatacagatgtatactcctcctgatggatcatccggtatagtctttgtggcatccgttgcacagtgtcacgaatataaatcatatttagaaaaaagattaccgtatgatatgtatattattcatggtaaggtcttagatatagacgaaatattagaaaaagtgtattcatcacctaatgtatcgataattatttctactccttatttggaatccagcgttactatacgcaatgttacacacatttatgatatgggtagagtttttgtccccgctccttttggaggatcgcaacaatttatttctaaatctatgagagatcaacgaaaaggaagagtaggaagagttaatcctggtacatacgtctatttctatgatctgtcttatatgaagtctatacagcgaatagattcagaatttctacataattatatattgtacgctaataagtttaatctaacactccccgaagatttgtttataatccctacaaatttggatattctatggcgtacaaaggaatatatagactcgttcgatattagtacagaaacatggaataaattattatccaattattatatgaagatgatagagtatgctaaactttatgtactaagtcctattctcgctgaggagttggataactttgagaggacgggagaattaactagtattgtacgagaagccattttatctctaaatttacgaattaagattttaaattttaaacataaagatgatgatacgtatatacacttttgtaaaatattattcggtgtctataacggaacaaacgctactatatattatcatagacctctaacgggatatatgaatatgatttcagatactatatttgttcctgtagataataactaaaaatcaaactctaatgaccacatctttttttagagatgaaaaattttccacatctccttttgtagacacgactaaacattttgcagaaaaaagtttattagtgtttagataatcgtatacttcatcagtgtagatagtaaatgtgaacagataaaaggtattcttgctcaatagattggtaaattccatagaatatattaatcctttcttcttgagatcccacatcatttcaaccagagacgttttatccaatgatttacctcgtactataccacatacaaaactagattttgcagtgacgtcgtacctggtattcttaccaaacaaaattttacttttagttcttttagaaaattctaaggtagaatctctatttgccaatatgtcatctatggaattaccactagcaaaaaatgatagaaatatatattgatacatcgcagctggttttgatctactatactttaaaaacgaatcagattccataattgcctgtatatcatcagctgaaaaactatgttttacacgtattccttcggcatttctttttaatgatatatcttgtttagacaatgataaagttatcatgtccatgagagacgcgtctccgtatcgtataaatatttcattagatgttagacgcttcattaggggtatacttctataaggtttcttaatcagtccatcattggttgcgtcaagaactactatcggatgttgttgggtatctctagtgttacacatggccttactaaagtttgggtaaataactatgatatctctattaattatagatgcatatatttcatttgtcaaggatattagtatcgacttgctatcgtcattaatacgtgtaatgtaatcatataaatcatgcgatagccaaggaaaatttaaatagatgttcatcatataatcgtcgctataattcatattaatacgttgacattgactaatttgtaatatagcctcgccacgaagaaagctctcgtattcagtttcatcgataaaggataccgttaaatataactggttgccgatagtctcatagtctattaagtggtaagtttcgtacaaatacagaatccctaaaatattatctaatgttggattaatctttaccataactgtataaaatggagacggagtcataactattttaccgtttgtacttactggaatagatgaaggaataatctccggacatgctggtaaagacccaaatgtctgtttgaagaaatccaatgttccaggtcctaatctcttaacaaaaattacgatattcgatcccgatatcctttgcattctatttaccagcatatcacgaactatattaagattatctatcatgtctattctcccaccgttatataaatcgcctccgctaagaaacgttagtatatccatacaatggaatacttcatttctaaaatagtattcgttttctaattctttaatgtgaaatcgtatactagaaagggaaaaattatctttgagttttccgttagaaaagaaccacgaaactaatgttctgattgcgtccgattccgttgctgaattaatggatttacaccaaaaactcatataacttctagatgtagaagcattcgctaaaaaattagtagaatcaaaggatataagtagatgttccaacaagtgagcaattcccaagatttcatctatatcattctcgaatccgaaattagaaattcccaagtagatatcctttttcatccgatcgttgatgaaaatacgaactttattcggtaagacaatcatttactaaggagtaaaataggaagtaatgttcgtatgtcgttatcatcgtataaattaaaggtgtgttttttaccattaagtgacattataattttaccaatattggaattataatataggtgtatttgcgcactcgcgacggttgatgcatcggtaaatatagctgtatctaatgttctagtcggtatttcatcatttcgctgtctaataatagcgttttctctatctgtttccattacagctgcctgaagtttattggtcggataatatgtaaaataataagaaatacatacgaataacaaaaataaaataagatataataaagatgccatttagagatctaattttgtttaacttgtccaaattcctacttacagaagatgaggaatcgttggagatagtgtcttccttatgtagaggatttgaaatatcttataatgacttgataacttactttccagataggaaataccataaatatatttataaagtatttgaacatgtagatttatcggaggaattaagtatggaattccatgatacaactctgagagatttagtctatcttagattgtacaagtattccaagtgtatacggccgtgttataaattaggagataatctaaaaggcatagttgttataaaggacaggaatatttatattagggaagcaaatgatgacttgatagaatatctcctcaaggaatacactcctcagatttatacatattctaatgagcgcgtccccataactggttcaaaattaattctttgtggattttctcaagttacatttatggcgtatacaacgtcgcatataacaacaaataaaaaggtagatgttctcgtttccaaaaaatgtatagatgaactagtcgatccaataaattatcaaatacttcaaaatttatttgataaaggaagcggaacaataaacaaaatactcaggaagatattttattcggtaacaggtggccaaactccataggtagctttttctatttcggattttagaatttccaaattcaccagcgatttatcggttttggtgaaatccaaggatttattaatgtccacaaatgccatttgttttgtctgtggattgtatttgaaaatggaaacgatgtagttagatagatgcgctgcgaagtttcctattagggttccgcgcttcacgtcacccagcatacttgaatcaccatcctttaaaaaaaatgataagatatcaacatggagtatatcatactcggattttaattcttctactgcatcactgacattttcacaaatactacaatacggtttaccgaaaataatcagtacgttcttcatttatgggtatcaaaaacttaaaatcgttactgctggaaaataaatcactgacgatattagatgataatttatacaaagtatacaatggaatatttgtggatacaatgagtatttatatagccgtcgccaattgtgtcagaaacttagaagagttaactacggtattcataaaatacgtaaacggatgggtaaaaaagggagggcatgtaaccctttttatcgatagaggaagtataaaaattaaacaagacgttagagacaagagacgtaaatattctaaattaaccaaggacagaaaaatgttagaattagaaaagtgtacatccgaaatacaaaatgttaccggatttatggaagaagaaataaaggcagaaatgcaattaaaaatcgataaactcacatttcaaatatatttatctgattctgataacataaaaatatcattgaatgagatactaacacatttcaacaataatgagaatgttacattattttattgtgatgaacgagacgcagaattcgttatgtgtctcgaggctaaaacacatttctctaccacaggagaatggccgttgataataagtaccgatcaggatactatgctatttgcatctgctgataatcatcctaagatgataaaaaacttaactcaactgtttaaatttgttccctcggcagaggataactatttagcaaaattaacggcgttagtgaatggatgtgatttctttcctggactctatggggcatctataacacccaccaacttaaacaaaatacaattgtttagtgattttacaatcgataatatagtcactagtttggcaattaaaaattattatagaaagactaactctaccgtagacgtgcgtaatattgttacgtttataaacgattacgctaatttagacgatgtctactcgtatattcctccttgtcaatgcactgttcaagaatttatattttccgcattagatgaaaaatggaatgaatttaaatcatcttatttagaaagcgtgccgttaccctgccaattaatgtacgcgttagaaccacgcaaggagattgatgtttcagaagttaaaactttatcatcttatatagatttcgaaaatactaaatcagatatcgatgttataaaatctatatcctcgatcttcggatattctaacgaaaactgtaacacgatagtattcggcatctataaggataatttactactgagtataaataattcattttactttaacgatagtctgttaataaccaatactaaaagtgataatataataaatataggttactagattaaaaatggtgttccaactcgtgtgctctacatgcggtaaagatatttctcacgaacgatataaattgattatacgaaaaaaatcattaaaggatgtactcgtcagtgtaaagaacgaatgttgtaggttaaaattatctacacaaatagaacctcaacgtaacttaacagtgcaacctctattggatataaactaatatggatccggttaattttatcaagacatatgcgcctagaggttctattatttttattaattataccatgtcattaacaagtcatttgaatccatcgatagaaaaacatgtgggtatttattatggtacgttattatcggaacacttggtagttgaatcaacatatagaaaaggagttcgaatagtcccattggatagtttttttgaaggatatcttagtgcaaaagtatacatgttagagaatattcaagttatgaaaatagcagctgatacgtcattaactttattgggtattccgtatggatttggtcataatagaatgtattgttttaaattggtagctgactgttataaaaatgccggtattgatacatcgtctaaacgaatattgggcaaagatatttttctgagccaaaacttcacagacgataatagatggataaagatatatgattctaataatttaacattttggcaaattgattaccttaaagggtgagttaatatgcataactactcctccgttgttttttccctcgttctttttcttaacgttgtttgccatcactctcataatgtaaagatattctaaaatggtaaacttttgcatatcggacgcagaaattggtataaatgttgtaattgtattatttcccgtcaatggactagtcacagctccatcagttttatatcctttagagtatttctcactcgtgtctaacattctagagcattccatgatctgtttatcgttgatattggccggaaagatagattttttattttttattatattactattggcaattgtagatataacttctggtaaatatttttctaccttttcaatctcttctattttcaagccggctatatattctgctatattgttgctagtatcaataccttttctggctaagaagtcatatgtggtattcactatatcagttttaactggtagttccattagcctttccacttctgcagaataatcagaaattggttctttaccagaaaatccagctactataataggctcaccgatgatcattggcaaaatcctatattgtaccagattaatgagagcatatttcatttccaataattctgctagttcttgagacattgatttatttgatgaatctagttggttctctagatactctaccatttctgccgcatacaataacttgttagataaaatcagggttatcaaagtgtttagcgtggctagaatagtgggcttgcatgtattaaagaatgcggtagtatgagtaaaccgttttaacgaattatatagtctccagaaatctgtggcgttacatacatgagccgaatgacatcgaagattgtccaatatttttaatagctgctctttgtccattatttctatatttgactcgcaacaattgtagataccattaatcaccgattcctttttcgatgccggacaatagcacaattgtttagctttggactctatgtattcagaattaatagatatatctctcaatacagattgcactatacattttgaaactatgtcaaaaattgtagaacgacgctgttctgcagccatttaactttaaataatttacaaaaatttaaaatgagcatccgtataaaaatcgataaactgcgccaaattgtggcatatttttcagagttcagtgaagaagtgtctataaatgtagactcgacggatgagttaatgtatatttttgccgccttgggcggatctgtaaacatttgggcaattatacctctaagtgcatcagtgttttaccgaggagccgaaaatattgtgtttaatcttcctgtgtccaaggtaaaatcgtgtttgtgtagttttcacaatgatgccatcatagatatagaacctgatctggaaaataatctagtaaaactttctagttatcatgtagtaagtgtcgattgtaacaaggaactgatgcctattaggacagatactactatttgtctaagtatagatcaaaagaaatcttacgtgtttaattttcacaagtatgaagaaaaatgttgtggtagaaccgtcattcatctagaatggttgttgggctttatcaagtgtattagtcagcatcagcatctggctattatgtttaaagatgacaatattattatgaagactcctggtaatactgatgcgttttccagggaatattctatgactgaatgttctcaagaactacaaaagttttctttcaaaatagctatctcgtctctcaacaaactacgaggattcaaaaagagagtcaatgtttttgaaactagaatcgtaatggataatgacgataacattttaggaatgttgttttcggatagagttcaatcctttaagatcaacatctttatggcgtttttagattaatactttcaatgagataaatatgggtggcggagtaagtgttgagctccctaaacgggatccgcctccgggagtacccactgatgagatgttattaaacgtggataaaatgcatgacgtgatagctcccgctaagcttttagaatatgtgcatataggaccactagcaaaagataaagaggataaagtaaagaaaagatatccagagtttagattagtcaacacaggacccggtggtctttcggcattgttaagacaatcgtataatggaaccgcacccaattgctgtcgcacttttaatcgtactcattattggaagaaggatggaaagatatcagataagtatgaagagggtgcagtattagaatcgtgttggccagacgttcacgacactggaaaatgcgatgttgatttattcgactggtgtcagggggatacgttcgatagaaacatatgccatcagtggatcggttcagcctttaataggagtaatagaactgtagagggtcaacaatcgttaataaatctgtataataagatgcaaacattatgtagtaaagatgctagtgtaccaatatgcgaatcatttttgcattatttacgcgcacacaatacagaagatagcaaagagatgatcgattatattctaagacaacagtctgcggactttaaacagaaatatatgagatgtagttatcccactagagataagttagaagagtcattaaaatatgcggaacctcgagaatgttgggatccagagtgttcgaatgccaatgttaatttcttactaacacgtaattataataatttaggactttgcaatattgtacgatgtaataccagcgtgaacaacttacagatggataaaacttcctcattaagattgtcatgtggattaagcaatagtgatagattttctactgttcccgtcaatagagcaaaagtagttcaacataatattaaacactcgttcgacctaaaattgcatttgatcagtttattatctctcttggtaatatggatactaattgtagctatttaaatgggtgccgcggcaagcatacagacgacggtgaatacactcagcgaacgtatctcgtctaaattagaacaagaagcgaatgctagtgctcaaacaaaatgtgatatagaaatcggaaatttttatatccgacaaaaccatggatgtaacctcactgttaaaaatatgtgctctgcggacgcggatgctcagttggatgctgtgttatcagccgctacagaaacatatagtggattaacaccggaacaaaaagcatacgtgccagctatgtttactgctgcgttaaacattcagacgagtgtaaacactgttgttagagattttgaaaattatgtgaaacagacttgtaattctagcgcggtcgtcgataacaaattaaagatacaaaacgtaatcatagatgaatgttacggagccccaggatctccaacaaatttggaatttattaatacaggatctagcaaaggaaattgtgccattaaagcgttgatgcaattgacgactaaggccactactcaaatagcacctagacaagttgctggtacaggagttcagttttatatgattgttatcggtgttataatattggcagcgttgtttatgtactatgccaagcgtatgctgttcacatccaccaatgataaaatcaaacttattttagccaataaggaaaacgtccattggactacttacatggacacattctttagaacttctccgatggttattgctaccacggatatgcaaaactgaaaatatattgataatattttaatagattaacatggaagttatcgctgatcgtctagacgatatagtgaaacaaaatatagcggatgaaaaatttgtagattttgttatacacggtctagagcatcaatgtcctgctatacttcgaccattaattaggttgtttattgatatactattatttgttatagtaatttatatttttacggtacgtctagtaagtagaaattatcaaatgttgttggtggtgctagtcatcacattaactattttttattactttatactataatagtactagactgacttctaacaaacatctcacctgccataaataaatgcttgatattaaagtcttctatttctaacactattccatctgtggaaaataatactctgacattatcgctaattgacacatcggtgagtgatatgcctataaagtaataatcttctttgggcacatataccagtgtaccaggttctaacaacctatttactggtgctcctgtagcatactttttctttaccttgagaatatccatcgtttgcttggtcaatagcgatatgtgattttttatcaaccactcgaaaaagtaattggagtgttcatatcctctacgggctattgtctcatggccgtgtatgaaatttaagtaacacgactgtggtagatttgttctatagagccggttgccgcaaatagatagaactaccaatatgtctgtacaaatgttaaacattaattgattaacagaaaaaacaatgttcgttctgggaatagaaaccagatcaaaacaaaattcgttagaatatatgccacgtttatacatggaatataaaataactacagtttgaaaaataacagtatcatttaaacatttaacttgcggggttaatctcacaactttactgtttttgaactgttcaaaatatagcatcgatccgtgagaaatacgtttagccgcctttaatagaggaaatcccaccgcctttctggatctcaccaacgacgatagttctgaccagcaactcatttcttcatcatccacctgttttaacatataataggcaggagatagatatccgtcattgcaatattccttctcgtaggcacacaatctaatattgataaaatctccattctcttctctgcatttattatcttgtctcggtggctgattaggctgtggtcttggtttaggccttggtctatcgttgttgaatctattttggtcattaaatctttcatttcttcctggtatatttctatcacctcgtttggttggatttttgtctatattatcgtttgtaacatcggtacgggtattcatttatcacaaaaaaaacttctctaaatgagtctactgctagaaaacctcatcgaagaagataccatattttttgcaggaagtatatctgagtatgatgatttacaaatggttattgccggcgcaaaatccaaatttccaagatctatgctttctatttttaatatagtacctagaacgatgtcaaaatatgagttggagttgattcataacgaaaatatcacaggagcaatgtttaccacaatgtataatataagaaacaatttgggtctaggagatgataaactaactattgaagccattgaaaactatttcttggatcctaacaatgaagttatgcctcttattattaataatacggatatgactgccgtcattcctaaaaaaagtggtaggagaaagaataagaacatggttatcttccgtcaaggatcatcacctatcttgtgcattttcgaaactcgtaaaaagattaatatttataaagaaaatatggaatccgcgtcgactgagtatacacctatcggagacaacaaggctttgatatctaaatatgcgggaattaatgtcctgaatgtgtattctccttccacatccataagattgaatgccatttacggattcaccaataaaaataaactagagaaacttagtactaataaggaactagaatcgtatagttctagccctcttcaagaacccattaggttaaatgattttctgggactattggaatgtgttaaaaagaatattcctctaacagatattccgacaaaggattgattactataaatggagaatgttcctaatgtatactttaatcctgtgtttatagagcccacgtttaaacattctttattaagtgtttataaacacagattaatagttttatttgaagtattcattgtattcattctaatatatgtattttttagatctgaattaaatatgttcttcatgcctaaacgaaaaatacccgatcctattgatagattacgacgtgctaatctagcgtgtgaagacgataaattaatgatctatggattaccatggatgacaactcaaacatctgcgttatcaataaatagtaaaccgatagtgtataaagattgtgcaaagcttttgcgatcaataaatggatcacaaccagtatctcttaacgatgttcttcgcagatgatgattcattttttaagtatttggctagtcaagatgatgaatcttcattatctgatatattgcaaatcactcaatatctagactttctgttattattattgatccaatcaaaaaataaattagaagctgtgggtcattgttatgaatctctttcagaggaatacagacaattgacaaaattcacagactttcaagattttaaaaaactgtttaacaaggtccctattgttacagatggaagggtcaaacttaataaaggatatttgttcgactttgtgattagtttgatgcgattcaaaaaagaatcctctctagctaccaccgcaatagatcctgttagatacatagatcctcgtcgtgatatcgcattttctaacgtgatggatatattaaagtcgaataaagtgaacaataattaattctttattgtcatcatgaacggcggacatattcagttgataatcggccccatgttttcaggtaaaagtacagaattaattagacgagttagacgttatcaaatagctcaatataaatgcgtgactataaaatattctaacgataatagatacggaacgggactatggacgcatgataagaataattttgaagcattggaagcaactaaactatgtgatgtcttggaatcaattacagatttctccgtgataggtatcgatgaaggacagttctttccagacattgtttaattctgtgagcgtatggcaaacgaaggaaaaatagttatagtagccgcactcgatgggacatttcaacgtaaaccgtttaataatattttgaatcttattccattatctgaaatggtggtaaaactaactgctgtgtgtatgaaatgctttaaggaggcttccttttctaaacgattgggtgaggaaaccgagatagagataataggaggtaatgatatgtatcaatcggtgtgtagaaagtgttacgtcggctcataatattatattttttatctaaaaaactaaaaataaacattgattaaattttaatataatacttaaaaatggatgttgtgtcgttagataaaccgtttatgtattttgaggaaattgataatgagttagattacgaaccagaaagtgcaaatgaggtcgcaaaaaaactgccgtatcaaggacagttaaaactattactaggagaattattttttcttagtaagttacagcgacacggtatattagatggtgccaccgtagtgtatataggatcggctcctggtacacatatacgttatttgagagatcatttctataatttaggagtgatcatcaaatggatgctaattgacggccgccatcatgatcctattctaaatggattgcgtgatgtgactctagtgactcggttcgttgatgaggaatatctacgatccatcaaaaaacaactgcatccttctaagattattttaatttctgatgtgagatccaaacgaggaggaaatgaacctagtacggcggatttactaagtaattacgctctacaaaatgtcatgattagtattttaaaccccgtggcgtctagtcttaaatggagatgcccgtttccagatcaatggatcaaggacttttatatcccacacggtaataaaatgttacaaccttttgctccttcatattcagctgaaatgagattattaagtatttataccggtgagaacatgagactgactcgagttaccaaattagacgctgtaaattatgaaaaaaagatgtactaccttaataagatcgtccgtaacaaagtagttgttaactttgattatcctaatcaggaatatgactattttcacatgtactttatgctgaggaccgtgtactgcaataaaacatttcctactactaaagcaaaggtactatttctacaacaatctatatttcgtttcttaaatattccaacaacatcaactgaaaaagttagtcatgaaccaatacaacgtaaaatatctagcaaaaattctatgtctaaaaacagaaatagcaagagatccgtacgcggtaataaatagaaacgtactactgagatatactaccgatatagagtataatgatttagttactttaataaccgttagacataaaattgattctatgaaaactgtgtttcaggtatttaacgaatcatccataaattatactccggttgatgatgattatggagaaccaatcattataacatcgtatcttcaaaaaggtcataacaagtttcctgtaaattttctatacatagatgtggtaatatctgacttatttcctagctttgttagactagatactacagaaactaatatagttaatagtgtactacaaacaggcgatggtaaaaagactcttcgtcttcccaaaatgttagagacggaaatagttgtcaagattctctatcgccctaatataccattaaaaattgttagatttttccgcaataacatggtaactggagtagagatagccgatagatctgttatttcagtcgctgattaatcaattagtagagatgagataagaacattataataatcaataatatatcttatatcttatatcttatatcttatatcttgtttagaaaaatgctaatattaaaatagctaacgctagtaatccaatcggaagccatttgatatctataatagggtatctaatttcctgatttaaatagcggacagctatattctcggtagctactcgtttggaatcacaaacattatttacatctaatttactatctgtaatggaaacgtttcccaatgaaatggtacaatccgatacattgcattttgttatatttttttttaaagaggctggtaacaacgcatcgcttcgtttacatggctcgtaccaacaataatagggtaatcttgtatctattcctatccgtactatgcttttatcaggataaatacatttacatcgtatatcgtctttgttagcatcacagaatgcataaatttgttcgtccgtcatgataaaaatttaaagtgtaaatataactattatttttatagttgtaataaaaagggaaatttgattgtatactttcggttctttaaaagaaactgacttgataaaaatggctgtaatctctaaggttacgtatagtctatatgatcaaaaagagattaatgctacagatattatcattagtcatgttaaaaatgacgacgatatcggtaccgttaaagatggtagactaggtgctatggatggggcattatgtaaaacttgtgggaaaacggaattggaatgtttcggtcactggggtaaagtaagtatttataaaactcatatagttaagcctgaatttatttcagaaattattcgtttactgaatcatatatgtattcactgcggattattgcgttcacgagaaccgtattccgacgatattaacctaaaagagttatcgggacacgctcttaggagattaaaggataaaatattatccaagaaaaagtcatgttggaacagtgaatgtatgcaaccgtatcaaaaaattactttttcaaagaaaaaggtttgtttcgtcaacaagttggatgatattaacgttcctaattctctcatctatcaaaagttaatttctattcatgaaaagttttggccattattagaaattcatcaatatccagctaacttattttatacagactactttcccatccctccgttgattattagaccggctattagtttttggatagatagtatacccaaagagaccaatgaattaacttacttattaggtatgatcgttaagaattgtaacttgaatgctgatgaacaggttatccagaaggcggtaatagaatacgatgatattaaaattatttctaataacactaccagtatcaatttatcatatattacatccggcaaaaataatatgattagaagttatatcgtcgcccgacgaaaagatcagaccgctagatctgtaattggtcccagtacatctatcaccgttaatgaggtaggaatgcccgcatatattagaaatacacttacagaaaagatatttgttaatgcctttacagtggataaagttaaacaactattagcgtcaaaccaagttaaattttactttaataaacgattaaaccaattaacaagaatacgccaaggaaagtttattaaaaataaaatacatttattgcctggtgattgggtagaagtagctgttcaagaatatacaagtattatttttggaagacagccgtctctacatagatacaacgtcatcgcttcatctatcagagctaccgaaggagatactatcaaaatatctcccggaattgccaactctcaaaatgctgatttcgacggggatgaggaatggatgatattagaacaaaatcctaaagctgtaattgaacaaagtattcttatgtatccgacgacgttactcaaacacgatattcatggagcccccgtttatggatctattcaagatgaaatcgtagcagcgtattcattgtttaggatacaagatctttgtttagatgaagtattgaacatcttggggaaatatggaagagagttcgatcctaaaggtaaatgtaaattcagcggtaaagatatctatacttacttgataggtgaaaagattaattatccgggtctcttaaaggatggtgaaattattgcaaacgacgtagatagtaattttgttgtggctatgaggcatctgtcattggctggactcttatccgatcataagtcgaacgtggaaggtatcaactttattatcaagtcatcttatgtttttaagagatatctatctatttacggttttggggtgacattcaaagatctgagaccaaattcgacgttcactaataaattggaggccatcaacgtagaaaaaatagaacttatcaaagaagcatacgccaaatatctcaacgatgtaagagacgggaaaatagttccattatctaaagctttagaggcggactatgtggaatccatgttatccaacttgacaaatcttaatatccgagagatagaagaacatatgagacaaacgctgatagatgatccagataataacctcctgaaaatggccaaagcgggttataaagtaaatcccacagaactaatgtatattctaggtacgtatggacaacaaaggattgatggtgaaccagcagagactcgagtattgggtagagttttaccttactatcttccagactctaaggatccagaaggaagaggttatattcttaattctttaacaaaaggattaacgggttctcaatattacttttcgatgctggttgcaagatctcaatctactgatatcgtctgtgaaacatcacgtaccggaacactggctagaaaaatcattaaaaagatggaggatatggtggtcgacggatacggacaagtagttataggtaatacgctcatcaagtacgccgccaattataccaaaattctaggctcagtatgtaaacctgtagatcttatctatccagatgagtccatgacttggtatttggaaattagtgctctgtggaataaaataaaacagggattcgtttactctcagaaacagaaacttgcaaagaagacattggcgccgtttaatttcctagtattcgtcaaacccaccactgaggataatgctattaaggttaaggatctgtacgatatgattcataacgtcattgatgatgtgagagagaaatacttctttacggtatctaatatagattttatggagtatatattcttgacgcatcttaatccttctagaattagaattacaaaagaaacggctatcactatctttgaaaagttctatgaaaaactcaattatactctaggtggtggaactcctattggaattatttctgcacaggtattgtctgagaagtttacacaacaagccctgtccagttttcacactactgaaaaaagtggtgccgtcaaacaaaaacttggtttcaacgagtttaataacttgactaatttgagtaagaataagaccgaaattatcactctggtatccgatgatatctctaaacttcaatctgttaagattaatttcgaatttgtatgtttgggagaattaaatccagacatcactcttcgaaaagaaacagataggtatgtagtagatataatagtcaatagattatacatcaagagagcagaaataaccgaattagtcgtcgaatatatgattgaacgatttatctcctttagcgtcattgtaaaggaatggggtatggaaacattcattgaggatgaggataatattagatttactgtctacctaaatttcgttgaaccggaagaattgaatcttagtaagtttatgatggttcttccgggtgccgccaacaagggaaagattagtaaattcaagattcctatctctgactatacgggttatgacgacttcaatcaaacaaaaaagctcaataagatgactgtagaactcatgaatctaaaagaattgggttctttcgatttggaaaacgtcaacgtgtatcctggagtatggaatacatacgatatcttcggtatcgaggccgctcgtgaatacttgtgcgaagccatgttaaacacctatggagaagggttcgattatctgtatcagccttgtgatcttctcgctagtttactatgtgctagttacgaaccagaatcagtgaataaattcaagttcggcgcagctagtactcttaagagagctacgttcggagacaataaagcattgttaaacgcggctcttcataaaaagtcagaacctattaacgataatagtagctgccacttttttagcaaggtccctaatataggaactggatattacaaatactttatcgacttgggtcttctcatgagaatggaaaggaaactatctgataagatatcttctcaaaagatcaaggaaatggaagaaacagaagacttttaattcttatcaataacatatttttctatgatctgtcttttaaacgatggattttccacaaatgcgcctctcaagtccctcatagaatgatacacgtataaaaaatatagcataggcgatgactccttatttttagacattagatatgccaaaatcatagccccgcttctatttactcccgcagcacaatgaaccaacacgggctcgtttcgttgatcacatttagataaaaaggcggttacgtcgtcaaaatatttactaatatcggtagttgtatcatctaccaacggtatatgaataatattaatattagagttaggtaatgtatatttatccatcgtcaaatttaaaacatatttgaacttaacttcagatgatggtgcatccatagcatttttataatttcccaaatacacattattggttacccttgtcattatagtgggagatttggctctgtgcatatctccagttgaacgtagtagtaagtatttatacaaacttttcttatccatttataacgtacaaatggataaaactactttatcggtaaacgcgtgtaatttagaatacgttagagaaaaggctatagtaggcgtacaagcagccaaaacatcaacacttatattctttgttattatattggcaattagtgcgctattactctggtttcagacgtctgataatccagtctttaatgaattaacgagatatatgcgaattaaaaatacggttaacgattggaaatcattaacggatagcaaaacaaaattagaaagtgatagaggtaaacttctagccgctggtaaggatgatatattcgaattcaaatgtgtggatttcggcgcctattttatagctatgcgattggataagaaaacatatctgccgcaagctattaggcgaggtactggagacgcgtggatggttaaaaaggcggcaaaggtcgatccatctgctcaacaattttgtcagtatttgataaaacacaagtctaataatgttattacttgtggtaatgagatgttaaatgaattaggttatagcggttattttatgtcaccgcattggtgttccgattttagtaatatggaatagtgttagataaatgcggtaacgaatgttcctgtaaggaaccataacagtttagatttaacgttaaagatgagcataaacataataaacaaaattacaatcaaacttataacattaatatcaaacaatccaaaaaatgaaatcagtggagtagtaaacgcgtacataactcctggataacgtttagcagctgccgttcctattctagaccaaaaatttggtttcatgttttcgaaacggtattctgcaacaagtcggggatcgtgttctacatatttggcggcattatccagtatctgcctattgatcttcatttcgttttcgattctggctatttcaaaataaaatcccgatgatagacctccagactttataatttcatctacgatgttcagcgccgtagtaactctaataatataggctgataagctaacatcataccctcctgtatatgtgaatatggcatgatttttgtccattacaagctcggttttaactttattgcctgtaataatttctctcatctgtaggatatctatttttttgtcatgcattgccttcaagacgggacgaagaaacgtaatatcctcaataacgttatcgttttctacaataactacatattctacctttttattttctaactcggtaaaaaaattagaatcccatagggctaaatgtctagcgatatttcttttcgtttcttctgtacacatagtgttacaaaaccctgaaaagaagtgagtatacttgtcatcatttctaatgtttcctccagtccactgtataaacgcataatccttgtaatgatctggatcatccttgactaccacaacatttcttttttctggcataacttcgttgtcctttacatcatcgaacttctgatcattaatatgctcatgaacattaggaaatgtttctgatggaggtctatcaataactggcacaacaataacaggagttttcaccgccgccatttagttattgaaattaatcatatacaactctttaatacgagttatattttcgtctatccattgtttcacattgacatatttcgacaaaaagatataaaatgcgtattccaatgcttctctgtttaatgaattactaaaatatacaaacacgtcactgtctggcaataaatgatatcttagaatattgtaacaatttattttgtattgcacatgttcgtgatctatgagttcttcttcgaatggcataggatctccgaatctgaaaacgtataaataggagttagaataataatatttgagagtattggtaatatataaactctttagcggtataattagtttttttctctcaatttctatttttagatgtgatggaaaaatgactaattttgtagcattagtatcatgaactctaatcaaaatcttaatatcttcgtcacacgttagctctttgaagtttttaagagatgcatcagttggttctacagatggagtaggtgcaacaattttttgttctacacatgtatgtactggagccattgttttaactataatggtgcttgtatcgaaaaactttaatgcagatagcggaagctcttcgccgcgactttctacgtcgtaattgggttctaacgccgatctctgaatggatactagttttctaagttctaatgtgattctctgaaaatgtaaatccaattcctccggcattatagatgtgtatacatcggtaaataaaactatagtatccaacgatcccttctcgcaaattctagtcttaaccaaaaaatcgtatataaccacggagatggcgtatttaagagtggattcttctaccgttttgttcttggatgtcatataggaaactataaagtccgcactactgttaagaatgattactaacgcaactatatagtttaaattaagcattttggaaacataaaataactctgtagacgatacttgactttcgaataagtttgcagacaaacgaagaaagaacagacctctcttaatttcagaagaaaactttttttcgtattcctgacgtctagagtttatatcaataagaaagttaagaattagtcggttaatgttgtatttcattacccaagtttgagatttcataatattatcaaaagacatgataatattaaagataaagcgctgactatgaacgaaatagctatatggttcgctcaagaatatagtcttgttaaacgtggaaacgataactgtatttttaatcacgtcagcggcatctaaattaaatataggtatatttattccacacactctacaatatgccacaccatcttcataataaataaattcgttagcaaaattattaattttagtgaaatagttagcgtcaactttcatagcttccttcaatctaatttgatgctcacacggtgcgaattccactctaacatcccttttccatgcctcaggttcatcgatctctataatatctagttttttgcgtttcacaaacacaggctcgtctctcgcgatgagatctgtatagtaactatgtaaatgataactagatagaaagatgtagctatatagatgacgatcctttaagagaggtataataactttaccccaatcagatagactgttgttatggtcttcggaaaaagaatttttataaatttttccagtattttccaaatatacgtacttaacatctaaaaaatccttaatgataataggaatggataatccgtctattttataaagaaatacatatcgcacattatacttttttttggaaatgggaataccgatgtgtctacataaatatgcaaagtctaaatattttttagagaatcttagttggtccaaattcttttccaagtacggtaatagatttttcatattgaacggtatcttcttaatctctggttctagttccgcattaaatgatgaaactaagtcactatttttataactaacgattacatcacctctaacatcatcatttaccagaatactgatcttcttttgtcgtaaatacatgtctaatgtgttaaaaaaaagatcatacaagttatacgtcatttcatctgtggtattcttgtcattgaaggataaactcgtactaatctcttctttaacagcctgttcaaatttatatcctatatacgaaaaaatagcaaccagtgtttgatcatccgcgtcaatattctgttctatcgtagtgtataacaatcgtatatcttcttctgtgatagtcgatacgttataaaggttgataacgaaaatatttttatttcgtgaaataaagtcatcgtaggattttggacttatatttgcgtctagtagatatgcttttatttttggaatgatctcaattagaatagtctctttagagtccatttaaagttacaaacaactaggaaattggtttatgatgtataatttttttagtttttatagattctttattctatacttaaaaaatgaaaataaatacaaaggttcttgagggttgtgttaaattgaaagcgagaaataatcataaattatttcattatcgcgatatccgttaagtttgtatcgtaatggcgtggtcaattacaaataaagcggatactagtagcttcacaaagatggctgaaatcagagctcatctaaaaaatagcgctgaaaataaagataaaaacgaggatattttcccggaagatgtaataattccatctactaagcccaaaaccaaacgagccactactcctcgtaaaccagcggctactaaaagatcaaccaaaaaggaggaagtggaagaagaagtagttatagaggaatatcatcaaacaactgaaaaaaattctccatctcctggagtcagcgacattgtagaaagcgtggccgctgtagagctcgatgatagcgacggggatgatgaacctatggtacaagttgaagctggtaaagtaaatcatagtgctagaagcgatctctctgacctaaaggtggctaccgacaatatcgttaaagatcttaagaaaattattactagaatctctgcagtatcgacggttctagaggatgttcaagcagctggtatctctagacaatttacttctatgactaaagctattacaacactatctgatctagtcaccgagggaaaatctaaagttgttcgtaaaaaagttaaaacttgtaagaagtaaatgcgtgcacttttttataaagatggtaaactctttaccgataataattttttaaatcctgtatcagacgataatccagcgtatgaggttttgcaacatgttaaaattcctactcatttaacagatgtagtagtatatgaacaaacgtgggaggaggcgttaactagattaatttttgtgggaagcgattcaaaaggacgtagacaatacttttacggaaaaatgcatgtacagaatcgcaacgctaaaagagatcgtatttttgttagagtatataacgttatgaaacgaattaattgttttataaacaaaaatataaagaaatcgtccacagattccaattatcagttggcggtttttatgttaatggaaactatgttttttattagatttggtaaaatgaaatatcttaaggagaatgaaacagtagggttattaacactaaaaaataaacacatagaaataagtcccgatgaaatagttatcaagtttgtaggaaaggacaaagtttcacatgaatttgttgttcataagtctaatagactatataaaccgctattgaaactgacggatgattctagtcccgaagaatttctgttcaacaaactaagtgaacgaaaggtatacgaatgtatcaaacagtttggtattagaatcaaggatctccgaacgtatggagtcaattatacgtttttatataatttttggacaaatgtaaagtccatatctcctcttccgtcaccaaaaaagttaatagcgttaactatcaaacaaactgctgaagtggtaggtcatactccatcaatttcaaaaagagcttatatggcaacgactattttagaaatggtaaaggataaaaattttttagatgtagtatctaaaactacgttcgatgaattcctatctatagtcgtagatcacgttaaatcatctacggatggatgatatagatctttacacaaataattacaagaccgataaatggaaatggataagcgtatgaaatctctcgcaatgacagctttcttcggagagctaagcacattagatattatggcattgataatgtctatatttaaacgccatccaaacaataccattttttcagtggataaggatggtcagtttatgattgatttcgaatacgataattataaggcttctcaatatttggatctgaccctcactccgatatctggagatgaatgcaagactcacgcatcgagtatagccgaacaattggcgtgtgtggatattattaaagaggatattagcgaatatatcaaaactactccccgtcttaaacgatttataaaaaaataccgcaatagatcagatactcgcatcagtcgagatacagaaaagcttaaaatagctctagctaaaggcatagattacgaatatataaaagacgcttgttaataagtaaatgaaaaaaaactagtcgtttataataaaacacgatatggatgccaacgtagtatcatcttctactattgcgacgtatatagacgctttagcgaagaatgcttcagaattagaacagaggtctaccgcatacgaaataaataatgaattggaactagtatttattaagccgccattgattactttgacaaatgtagtgaatatctctacgattcaggaatcgtttattcgatttaccgttactaataaggaaggtgttaaaattagaactaagattccattatctaaggtacatggtctagatgtaaaaaatgtacagttagtagatgctatagataacatagtttgggaaaagaaatcattagtgacggaaaatcgtcttcacaaagaatgcttgttgagactatcgacagaggaacgtcatatatttttggattacaagaaatatggatcctctatccgactagaattagtcaatcttattcaagcaaaaacaaaaaactttacgatagactttaagctaaaatattttctaggatccggtgcccaatctaaaagttctttgttgcacgctattaatcatccaaagtcaaggcctaatacatctctggaaatagaattcacacctagagacaatgaaacagttccatatgatgaactaataaaggaattgacgactctctcgcgtcatatatttatggcttctccagagaatgtaattctttctccgcctattaacgcgcctataaaaacctttatgttgcctaaacaagatatagtaggtttggatctggaaaatctatatgccgtaactaagactgacggcattcctataactatcagagttacatcaaacgggttgtattgttattttacacatcttggttatattattagatatcctgttaagagaataatagattccgaagtagtagtctttggtgaggcagttaaggataagaactggaccgtatatctcattaagctaatagagcccgtgaatgctatcagtgatagactagaagaaagtaagtatgttgaatctaaactagtggatatttgtgatcggatagtattcaagtcaaagaaatacgaaggtccgtttactacaactagtgaagtcgtcgatatgttatctacatatttaccaaagcaaccagaaggtgttattctgttctattcaaagggacctaaatctaacattgattttaaaattaaaaaggaaaatactatagaccaaactgcaaatgtagtatttaggtacatgtccagtgaaccaattatctttggagaatcgtctatctttgtagagtataagaaatttagcaacgataaaggctttcctaaagaatatggttctggtaagattgtgttatataacggcgttaattatctaaataatatctattgtttggaatatattaatacacataatgaagtgggtattaagtccgtggttgtacctattaagtttatagcagaattcttagttaatggagaaatacttaaacctagaattgataaaaccatgaaatatattaactcagaagattattatggaaatcaacataatatcatagtcgaacatttaagagatcaaagcatcaaaataggagatatctttaacgaggataaactatcggatgtgggacatcaatacgccaataatgataaatttagattaaatccagaagttagttattttacgaataaacgaactagaggaccgttgggaattttatcaaactacgtcaagactcttcttatttctatgtattgttccaaaacatttttagacgattccaacaaacgaaaggtattggcgattgattttggaaacggtgctgacctggaaaaatacttttatggagagattgcgttattggtagcgacggatccggatgctgatgctatagctagaggaaatgaaagatacaacaaattaaactctggaattaaaaccaagtactacaaatttgactacattcaggaaactattcgatccgatacatttgtctctagtgtcagagaagtattctattttggaaagtttaatatcatcgactggcagtttgctatccattattcttttcatccgagacattatgctaccgtcatgaataacttatccgaactaactgcttctggaggcaaggtattaatcactaccatggacggagacaaattatcaaaattaacagataaaaagacttttataattcataagaatttacctagtagcgaaaactatatgtctgtagaaaaaatagctgatgatagaatagtggtatataatccatcaacaatgtctactccaatgactgaatacattatcaaaaagaacgatatagtcagagtgtttaacgaatacggatttgttcttgtagataacgttgatttcgctacaattatagaacgaagtaaaaagtttattaatggcgcatctacaatggaagatagaccgtctacaaaaaactttttcgaactaaatagaggagccattaaatgtgaaggtttagatgtcgaagacttacttagttactatgttgtttatgtcttttctaagcggtaaataataatatggtatgggttctgatatccccgttctaaatgcattaaataattccaatagagcgatttttgttcctataggaccttccaactgtggatactctgtattgttaatagatatattaatacttttgtcgggtaacagaggttctacgtcttctaaaaataaaagtttgataacatctggcctgttcataaataaaaacttggcgattctatatatactcttattatcaaatctagccattgtcttatagatgtgagctactgtaggtgtaccatttgattttctttctaatactatatatttctctcgaagaagttcttgcacatcatctgggaataaaatactactgttgagtaaatcagttattttttttatatcgatattgatggacatttttatagttaaggataataagtatcccaaagtcgataacgacgataacgaagtatttatacttttaggaaatcacaatgactttatcagattaaaattaacaaaattaaaggagcatgtatttttttctgaatatattgtgactccagatacatatggatctttatgcgtcgaattaaatgggtctagttttcagcacggtggtagatatatagaggtggaggaatttatagatgctggaagacaagttagatggtgttctacatccaatcatatatctaaagatatacccgaagatatgcacactgataaatttgtcatttatgatatatacacttttgacgctttcaagaataaacgattggtattcgtacaggtacctccgtcgttaggagatgatagtcatttgactaatccgttattgtctccgtattatcgtaattcagtagccagacaaatggtcaataatatgatttttaatcaagattcatttttaaaatatttattagaacatctgattagaagccactatagagtttctaaacatataacaatagttagatacaaggataccgaagaattaaatctaacgagaatatgttataatagagataagtttaaggcgtttgtattcgcttggtttaacggcgtttcggaaaatgaaaaggtactagatacgtataaaaaggtatctaatttgatataatgaattcagtgactgtatcacacgcgccatatactattacttatcacgatgattgggaaccagtaatgagtcaattggtagagttttataacgaagtagccagttggctgctacgagacgagacgtcgcctattcctgataagttctttatacagttgaaacaaccgcttagaaataaacgagtatgtgtgtgcggtatagatccgtatccgaaagatggaactggtgtaccgttcgaatcaccaaattttacaaaaaaatcaattaaggagatagcttcatctatatctagattaaccggagtaattgattataaaggttataaccttaatataatagacggggttataccctggaattattacttaagttgtaaattaggagaaacaaaaagtcacgcgatctactgggataagatttccaagttactgctgcagcatataactaaacacgttagtgttctttattgtttgggtaaaacagatttctcgaatatacgggcaaagttagaatccccggtaactaccatagtcggatatcatccagcggctagagaccgccaattcgagaaagatagatcatttgaaattatcaacgttttactggaattagacaacaaggcacctataaattgggctcaagggtttatttattaatgctttagtgaaattttaacttgtgttctaaatggatgcggctattagaggtaatgatgttatctttgttcttaagactataggtgtcccgtcagcgtgcagacaaaatgaagatccaagatttgtagaagcatttaaatgcgacgagttagaaagatatattgagaataatccagaatgtacactattcgaaagtcttagggatgaggaagcatactctatagtcagaattttcatggatgtagatttagacgcgtgtctagacgaaatagattatttaacggctattcaagattttattatcgaggtgtcaaactgtgtagctagattcgcgtttacagaatgcggtgccattcatgaaaatgtaataaaatccatgagatctaatttttcattgactaagtctacaaatagagataaaacaagttttcatattatctttttagacacgtataccactatggatacattgatagctatgaaacgaacactattagaattaagtagatcatctgaaaatccactaacaagatcgatagacactgccgtatataggagaaaaacaactcttcgggttgtaggtactaggaaaaatccaaattgcgacactattcatgtaatgcaaccaccgcatgataatatagaagattacctattcacttacgtggatatgaacaacaatagttattacttttctctacaacaacgattggaggatttagttcctgataagttatgggaaccagggtttatttcattcgaagacgctataaaaagagtttcaaaaatattcattaattctataataaactttaatgatctcgatgaaaataattttacaacggtaccactggtcatagattacgtaacaccttgtgcattatgtaaaaaacgatcgcataaacatccgcatcaactatcgttggaaaatggtgctattagaatttacaaaactggtaatccacatagttgtaaagttaaaattgttccgttggatggtaataaactgtttaatattgcacaaagaattttagacactaactctgttttattaaccgaacgaggagaccatatagtttggattaataattcatggaaatttaacagcgaagaacccttgataacaaaactaattttgtcaataagacatcaactacctaaggaatattcaagcgaattactctgtccgaggaaacgaaagactgtagaagctaacatacgagacatgttagtagattcagtggagaccgatacctatccggataaacttccgtttaaaaatggtgtattggacctggtagacggaatgttttactctggagatgatgctaaaaaatatacgtgtactgtatcaaccggatttaaatttgacgatacaaagttcgtcgaagacagtccagaaatggaagagttaatgaatatcattaacgatatccaaccattaacggatgaaaataagaaaaatagagagctatatgaaaaaacattatctagttgtttatgcggtgctaccaaaggatgtttaacattcttttttggagaaactgcaactggaaagtcgacaaccaaacgtttgttaaagtctgctatcggtgacctgtttgttgagacgggtcaaacaattttaacagatgtattggataaaggacctaatccatttatcgctaacatgcatttgaaaagatctgtattctgtagcgaactacctgattttgcatgtagtgggtcaaagaaaatcagatctgataatattaaaaagttgacagaaccttgtgtcattggaagaccgtgtttctccaataaaattaataatagaaaccatgcgacaatcattatcgatactaattacaaacctgtttttgataggatagataacgcattaatgagaagaattgccgtcgtgcgattcagaacacacttttctcaaccttctggtagagaggctgctgaaaataatgacgcgtacgataaagtcaaactattagacgaggggttagatggtaaaatacaaaataatagatatagattcgcatttctatacttgttggtgaaatggtacagaaaatatcatgttcctattatgaaactatatcctacacccgaagagattcctgactttgcattctatctcaaaataggtactctgttggtatctagctctgtaaagcatattccattaatgacggacctctccaaaaagggatatatattgtacgataatgtggtcactcttccgttgactactttccaacagaaaatatccaagtattttaattctagactatttggacacgatatagagagcttcatcaatagacataagaaatttgccaatgttagtgatgaatatctgcaatatatattcatagaggatatttcatctccgtaaatatatgctcatatatttatagaagatatcacatatctaaatgaataccggaatcatagatttatttgataatcatgttgatagtataccaactatattacctcatcagttagctactctagattatctagttagaactatcatagatgagaacagaagcgtgttattgttccatattatgggatcaggtaaaacaataatcgctttgttgttcgccttggtagcttccagatttaaaaaggtttacattctagtgccgaacatcaacatcttaaaaattttcaattataatatgggtgtagctatgaacttgtttaatgacgaattcatagctgagaatatctttattcattccacaacaagtttttattctcttaattataacgataacgtcattaattataacggattatctcgctacaataactctatttttatcgttgatgaggcacataatatctttgggaataatactggagaacttatgaccgtgataaaaaataaaaacaagattccttttttactattgtctggatctcccattactaacacacctaatactctgggtcatattatagatttaatgtccgaagagacgatagattttggtgaaattattagtcgtggtaagaaagtaattcagacacttcttaacgaacgcggtgtgaatgtacttaaggatttgcttaaaggaagaatatcatattacgaaatgcctgataaagatctaccaacgataagatatcacggacgtaagtttctagatactagagtagtatattgtcacatgtctaaacttcaagagagagattatatgattactagacgacagctatgttatcatgaaatgtttgataaaaatatgtataacgtgtcaatggcagtattgggacaacttaatctgatgaataatttagatactttatttcaggaacaggataaggaattgtacccaaatctgaaaataaataatggcgtgttatacggagaagaattggtaacgttaaacattagttccaaatttaaatactttattaatcggatacagacactcaacggaaaacattttatatacttttctaattctacatatggcggattggtaattaaatatatcatgctcagtaatggatattctgaatataatggttctcagggaactaatccacatatgataaacggcaaaccaaaaacatttgctatcgttactagtaaaatgaaatcgtctttagaggatctattagatgtgtataattctcctgaaaacgatgatggtagtcaattgatgtttttgttttcatcaaacattatgtccgaatcctatactctaaaagaggtaaggcatatttggtttatgactatcccagatactttttctcaatacaaccaaattcttggacgatctattagaaaattctcttacgccgatatttctgaaccagttaatgtatatcttttagccgccgtatattccgatttcaatgacgaagtgacgtcattaaacgattacacacaggatgaattaattaatgttttaccatttgacatcaaaaagctgttgtatctaaaatttaagacgaaagaaacgaatagaatatactctattcttcaagagatgtctgaaacgtattctcttccaccacatccatcaattgtaaaagttttattgggagaattggtcagacaatttttttataataattctcgtattaagtataacgataccaagttacttaaaatggttacatcagttataaaaaataaagaagacgctaggaattacatagatgatattgtaaacggtcacttctttgtatcgaataaagtatttgataaatctcttttatacaaatacgaaaacgatattattacagtaccgtttagactttcctacgaaccatttgtttggggagttaactttcgtaaagaatataacgtggtatcttctccataaaactgatgagatatataaagaaataaatgtcgagctttgttaccaatggatacctttccgttacattggaaccacacgagctgacgttagacataaaaactaatattaggaatgccgtatataagacgtatctccatagagaaattagtggtaaaatggccaagaaaatagaaattcgtgaagacgtggaattacctctcggcgaaatagttaataattctgtagttataaacgttccgtgtgtaataacctacgcgtattatcacgttggggatatagtcagaggaacattaaacatcgaagatgaatcaaatgtaactattcaatgtggagatttaatctgtaaactaagtagagattcgggtactgtatcatttagcgattcaaagtactgcttttttcgaaatggtaatgcgtatgacaatggcagcgaagtcactgccgttctaatggaggctcaacaaggtatcgaatctagttttgtttttctcgcgaatatcgtcgactcataaaaaagagaatagcggtaagtataaacacgaatactatggcaataattgcgaatgttttattctcttcgatatatttttgataatatgaaaaacatgtctctctcaaatcggacaaccatctcataaaatagttctcgcgcgctggagaggtagttgccgctcgtataatctctccagaataatatacttgcgtgtcgtcgttcaatttatacggatttctatagttctctgttatataatgcggtttgccctcatgattagacgacgacaatagtgttctaaatttagatagttgatcagaatgaatgtttattggcgttggaaaaattatccatacagcgtctgcagagtggttgatagttgttcctagatatgtaaaataatccaacttactaggcagcaaattgtctagataaaatactgaatcaaacggtgcagacgtattggcggatctaatggaatccaattgattaactatcttttgaaaatatacatttttatgatccaatacttgtaagaatatagaaataatgataagtccatcatcgtgtttttttgcctcttcataagaactatattttttcttattccaatgaacaagattaatctctccagagtatttgtacacatctatcaagtgattggatccataatcgtcttcctttccccaatatatatgtagtgatgataacacatattcattggggagaaaccctccacttatatatcctcctttaaaattaatccttactagttttccagtgttctggatagtggttggtttcgactcattataatgtatgtctaacggcttcaatcgcgcgttagaaattgcttttttagtttctatattaataggagatagttgttgcggcatagtaaaaatgaaatgataactgtttaaaaatagctcttagtatgggaattacaatggatgaggaagtgatatttgaaactcctagagaattaatatctattaaacgaataaaagatattccaagatcaaaagacacgcatgtgtttgctgcgtgtataacaagtgacggatatccgttaataggagctagaagaacttcattcgcgttccaggcgatattatctcaacaaaattcagattctatctttagagtatccactaaactattacggtttatgtactacaatgaactaagagaaatctttagacggttgagaaaaggttctatcaacaatatcgatcctcactttgaagagttaatattattgggtggtaaactagataaaaaggaatctattaaagattgtttaagaagagaattaaaagaggaaagtgatgaacgtataacagtaaaagaatttggaaatgtaattctaaaacttacaacacgggataaattatttaataaagtatatataagttattgcatggcgtgttttattaatcaatcgttggaggatttatcgcatactagtatttacaatgtagaaattagaaagattaaatcattaaatgattgtattaacgacgataaatacgaatatctgtcttatatttataatatgctagttaatagtaaatgaacttttacagatctagtataattagtcagattattaagtataatagacgactagctaagtctattatttgcgaggatgactctcaaattattacactcacggcattcgttaaccaatgcctatggtgtcataaacgagtatccgtgtccgctattttattaactactgataacaaaatattagtatgtaacagacgagatagttttctctattctgaaataattagaactagaaacatgtttagaaagaaacgattatttctgaattattccaattatttgaacaaacaggaaagaagtatactatcgtcatttttttctctagatccagctactactgataatgatagaatagacgctatttatccgggtggcatacccaaaaggggtgagaatgttccagagtgtttatccagggaaattaaagaagaagttaatatagacaattcttttgtattcatagacactcggttttttattcatggcatcatagaagataccattattaataaattttttgaggtaatcttctttgtcggaagaatatctctaacgagtgatcaaatcattgatacatttaaaagtaatcatgaaatcaaggatctaatatttttagatccgaattcaggtaatggactccaatacgaaattgcaaaatatgctctagatactgcaaaacttaaatgttacggccatagaggatgttattatgaatcattaaaaaaattaactgaggatgattgattaaaaaatataaattaatttaccatcgtgtatttttataacgggattgtccggcatatcatgtagatagttaccgtctacatcgtatactcgaccatctacgcctttaaatcctctatttattgacattaatctattagaattggaataccaaatattagtaccctcaattagtttattggtaatattttttttagacgatagatcgatggctcttgaaaccaaggttttccaaccggactcattgtcgatcggtgagaagtctttttcattagcatgaatccattctaatgatgtatgtttaaacactctaaacaattggacaaattcttttgatttgctttgaatgatttcaaataggtcttcgtctacagtaggcataccattagataatctagccattataaagtgcacgtttacatatctacgttctggaggagtaagaacgtgactattgagacgaatggctcttcctactatctgacgaagagacgcctcgttccatgtcatatctaaaatgaagatatcattaattgagaaaaaactaataccctcgcctccactagaagagaatacgcatgttttaatgcattctccgttagtgtttgattcttggttaaactcagccaccgccttgattctagtatcttttgttctagatgagaactctatattagagataccaaagactttgaaatatagtaataagatttctattcctgactgattaacaaatggttcaaagactagacatttaccatgggatgctaatattcccaaacatacatctataaatttgacgcttttctcttttaattcagtaaatagagagatatcagccgcactagcatcccctttcaatagttctccctttttaaaggtatctaatgcggatttagaaaactctctatctcttaatgaatttttaaaatcattatatagtgttgctatctcttgcgcgtattcgcccggatcacgattttgtctttcaggaaagctatcgaacgtaaacgtagtagccatacgtctcagaattctaaatgatgatatacctgtttttatttcagcgagtttagccttttgataaatttcttcttgctttttcgacatattaacgtatcgcattaatactgttttcttagcgaatgatgcagacccttctacgtcatcaaaaatagaaaactcgttattaactatatacgaacatagtcctcctagtttggagactaattctttttcatcgactagacgtttattctcaaatagtgattggtgttgtaaggatcctggtcgtagtaagttaaccaacatggtgaattcttgcacactattgacgataggtgtagccgataaacaaatcatcttatggttttttaacgcaatggtcttagataaaaaattatatactgaacgagtaggacggatcttaccatcttctttgattaatgatttagaaatgaagttatgacattcatcaatgatgacgcatattctactcttggaattaatagttttgatattagtaaaaaatttatttctaaaattttgatcatcgtaattaataaaaatacaatccttcgttatctctggagcgtatctgagtatagtgttcatccaaggatcttctatcaaagcctttttcaccaataagataatagcccaattcgtataaatatccttaagatgtttgagaatatatacagtagtcattgttttaccgacacccgtttcatggaacaataaaagagaatgcatactgtctaatcctaagaaaactcttgctacaaaatgttgataatccttgaggcgtactacgtccgaccccatcatttcaacgggcatattagtagttctgcgtaaggcataatcgatataggccgcgtgtgatttactcatttatgagtgataagtaataactatgttttaaaaatcacagcagtagtttaactagtcttctctgatgtttgttttcgatactttttgaatcagaagtcatactagaataaagcaacgagtgaacgtaatagagagcttcgtatactctattcgaaaactctaagaacttattaatgaattccgtatccactggattgtttaaaatactaaattgaacactgttcacatccttccaagaagaagacttagtgacggacttaacatgagacataaataaatccaaattttttttacaaacatcactagccaccataatggcgctatctttcaaccagctatcgcttacgcattttagcagtctaacatttttaaagagactacaatatattctcatagtatcgattacacctctaccgaataaagttggaagtttaataatacaatatttttcgtttacaaaatcaaataatggtcgaaacacgtcgaaggttaacatcttataatcgctaatgtatagattgttttcagtgagatgattattagatttaatagcatctcgttcacgtttgaacagtttattgcgtgcgctgaggtcggcaactacggcgtccgctttagtactcctcccataatactttacgctattaatctttaaaatttcatagactttatctagatcgctttctggtaacatgatatcatgtgtaaaaagttttaacatgtcggtcggcattctatttagatcattaactctagaaatctgaagaaagtaattagctccgtattccagactaggtaatgggcttttacctagagacagattaagttctggcaatgtttcataaaatggaagaaggacatgcgttccctcccggatattttttacaatttcatccatttacaactctatagtttgttttcattattattagttattatctcccataatcttggtaatacttaccccttgatcgtaagataccttatacaggtcattacatacaactaccaattgtttttgtacataatagattggatggttgacatccatggtggaataaactactcgaacagatagtttatctttccccctagatacattagccgtaatagttgtcggcctaaagaatatctttggtgtaaagttaaaagttagggttcttgttccattattgctttttgtcagtagttcattataaattctcgagatgggtccgttctctgaatatagaacatcatttccaaatctaacttctagtctagaaataatatcggtcttattcttaaaatctattcccttgatgaagggatcgttaatgaacaaatccttggcctttgattcggctgatctattatctccgttatagacgttacgttgactagtccaaagacttacaggaatagatgtatcgatgatgttgatactatgtgatatgtgagcaaagattgttctcttagtggcatcactatatgttccagtaatggcggaaaactttttagaaatgttatatataaaagaattttttcgtgttccaaacattagcagattagtatgaagataaacactcatattatcaggaacattatcaatttttacatacacatcagcatcttgaatagaaacgataccatcttctggaacctctacgatctcggcagactccggataaccagtcggtggaccatcgctaacaataactagatcatccaacaatctactcacatatgcatctatataatctttttcatcttgtgagtaccctggatacgaaataaatttattatccgtatttccataataaggtttagtataaacagagagagatgttgccgcatgaacttcagttacagtcgccgttggttggtttatttgacctattactctcctaggtttctctataaacgatggtttaatttgtacattcttaaccatatatccaataaagctcaattcaggaacataaacaaattctttgttgaacgtttcaaagtcgaacgaagagtcacgaataacgatatcggatactggattgaaggttaccgttacggtaatttttgaatcggatagtttaagactgctgaatgtatcttccacatcaaacggagttttaatataaacgtatactgtagatggttctttaatagtgtcattaggagttaggccaatagaaatatcattaagttcactagaatatccagagtgtttcaaagcaattgtattattgatacaattattatataattcttcgccctcaatttcccaaataacaccgttacacgaagagatagatacgtgattaatacatttatatccaacatatggtacgtaactgaatcttcccatacctttaacttctggaagttccaaactcagaaccaaatgattaagcgcagtaatatactgatccctaatttcgaagctagcgatagcctgattgtctggaccatcgtttgtcataactccggatagagaaatatattgcggcatatataaagttggaatttgactatcgactgcgaagacattagaccgtttaatagagtcatccccaccgatcaaagaattaatgatagtattattcattttctatttaaaatggaaaaagcttacaataaactccgtagagaaatatctataatttgtgagttttccttaaagtaacagcttccgtaaacgccgtctttatctcttagtaggtttattgtatttatgaccttttccttatcttcatagaatactaaaggcaacaaagaaatttttggttcttctctaagagctacgtgagacttaaccatagaagccaacgaatccctacatattttagaacagaaataccctacttcaccacccttgtatgtctcaatactaataggtctaaaaaccaaatcttgattacaaaaccaacacttatcaattacactatttgtcttaatagacacatctgccatagatttataatactttggtagtatacaagcgagtgcttcttctttagcgggcttaaagactgctttaggtgctgaaataaccacatctggaaggcttactcgcttagccatttaattacggaactatttttttatacttctaatgagcaagtagaaaacctctcatctacaaaaacgtactcgtgtccataatcctctaccatagttacacgttttttagatctcatatgtgctaaaaagttttcccatactaattggttactattatttttcgtataatttttaacagtttgaggttttagatttttagttacagaagtgatatcgaatattttatccaaaaagaatgaataattaattgtcttagaaggagtgttttcttggcaaaagaataccaagtgcttaaatatttctactacttcattaatcttttctgtactcagattcagtttctcatcttttacttgattgattatttcaaagactaacttataatcctttttatttattctctcgttagccttaagaaaactagatacaaaatttgcatctacatcatccgtggatatttgatttttttccatgatatccaagagttccgagataatttctccagaacattgatgagacaataatctccgcaatacatttctcaaatgaataagtttattagacacgtggaagtttgactttttttgtacctttgtacatttttgaaataccgactcgcaaaaaatacaatattcatatccttgttcagatactataccgttatgtctacaaccgctacataatcgtagattcatgttaacactctacgtatctcgtcgtccaatattttatataaaaacattttatttctagacgttgccagaaaatcctgtaatatttttagttttttgggctgtgaataaagtatcgccctaatattgttaccgtcttccgccaatatagtagttaaattatccgcacatgcagaagaacaccgcttaggcggattcagtacaatgttatatttttcgtaccaactcatttaaatatcataatctaaaatagttctgtaatatgtctagcgctaatatattgatcataatcctgtgcataaattaagatacaacaatgtctcgaaatcatcgacatggcttcttccatagttagaagatcgtcgtcaaagttagcaacgtgattcatcaacatttgctgttttgaggcagcaaatactgaaccgtcgccattcaaccattcataaaaaccatcgtctgaatccattgataatttcttgtactggtttttgagagctcgcatcaatctagcatttctagctcccggattgaaaacagaaagaggatcgtacatccagggtccattttctgtaaatagaatcgtataatgtcccttcaagaagatatcagacgatccacaatcaaagaattggtctccgagtttgtaacagacagcggactttaacctatacatgataccgtttagcataatttctggtgatacgtcaatcggagtatcatctattagagatctaaagccggtgtaacattctccaccaaacatattcttattctgacgtcgttctacataaaacatcattgctccattaacgataacaggggaatgaacagcactacccatcacattagttcccaatggatcaatgtgtgtaactccagaacatcttccatagcctatgttaggaggagcgaacaccactcttccactattgccatcgaatgccatagaataaatatccttggaattgatagaaatcggactgtcggatgttgtgatcatcttcataggattaacaactatgtatggtgccgcctgaagtttcatatcgtaactgatgccgtttataggtctagccacagaaaccaacgtaggtctaaatccaactatagacaaaatagaagccaatatctgttcctcatctgtcataacttgagagcatccagtatgaataatcttcattagatggggatctaccgcatcatcatcgttacaataaaaaattcccattctaatgttcataattgcttttctaatcatggtatgcatgtttgctctctgaatctctgtggaaattagatctgatacacctgtaatcactatcggattatcctccgtaagacgattaaccaacaacatataattataagactttacttttctaaattcataaagttgctggattaggctataggtgtctccatgtacatacgcgttctcgagcgcaggaagtttaataccgaatagtgccatcagaataggatgaatatagtaattagtttctggttttctataaataaaagacaaatcttgtgaactagacatatcggtaaaatgcatggattggaatcgtgtagtcgacagaagaatatgatgattagatggagagtatattttatctaactctttgagttggtcaccgattctaggactagctcgagaatgaataagtactaaaggatgagtacatttcacagaaacactagcattgttcaatgtgctctttacatgggtaaggagttgaaatagctcgtttctatttgttctgacaatatttagtttattcataatgttaagcatatcctgaatagtaaagttagatgtgtcatacttgttagtagttagatatttagcaattgcattcccatcatttctcaatctcgtactccaatcatgcgtagatgctacttcatctatagaaaccatacaatcctttttgataggctgttgagattgattatttcctgcacgtttaggtttggtacgttgatttctagcccctgcggatataaagtcatcgtctacaatttgggacaatgaattgcatacactacaagacaaagatttatcagaagtgtgaatatgatcttcatctaccaaagaaagagtttgattagtataactagattttagtcctgcgttagatgttaaaaaaacatcgctattgaccacggcttccattatttatattcgtagtttttactcgaaagcgtgattttaatatccaatcttattacttttggaatcgttcaaaacctttgactaattgtagaatttgatctattgccctacgcgtatactcccttgcatcatatacgttcgtcaccagatcgtttgtttcggcctgaagttggtgcatatctctttcaacattcgacatgagatccttaagggccatatcgtctagattttgttgagatgctgctcctggatttggattttgttgtgctgttgtacatactgtaccaccagtaggtgtaggagtacatacagtggccacaataggaggttgaggaggtgtaaccgttggagtagtacaagaaatacttccatccgattgttgtgtacatgtagttgttggtaacgtctgagaaggttgggtagatggcggcgtcgtcgttttttgatctttattaaatttagagataatatcctgaacagcattgctcggcgtcaacgctggaaggagtgaactcgccggcgcatcagtatcttcagacagccaatcaaaaagattagacatatcagatgatgtattagtttgttgtcgtggttttggtgtaggagcagtactactaggtagaagaataggagccggtgtagctgttggaaccggctgtggagttatatgaatagttggttgtagcggttggataggctgtctgctggcggccatcatattatctctagctagttgttctcgcaactgtctttgataatacgactcttgagactttagtcctatttcaatcgcttcatcctttttcgtatccggatccttttcttcagaataatagattgacgactttggtgtagaggattctgccagcctctgtgagaacttgttaaagaagtccatttaaggctttaaaattgaattgcgattataagattaaatggcagacacagacgatattatcgactatgaatccgatgatctcaccgaatacgaggatgatgaagaagaggaagaagatggagagtcactagaaactagtgatatagatcccaaatcttcttataagattgtagaatcagcatccactcatatagaagatgcgcattctaatcttaaacatatagggaatcatatatctgctcttaaacgacgctatactagacgtataagtctatttgaaatagcgggtataatagcagaaagctataacttgcttcaacgaggaagattacctctagtttcagaattttctgacgaaacgatgaagcaaaatatgctacatgtaattatacaagagatagaggagggttcttgtcctatagtcatcgaaaagaacggagaattgttgtcggtaaacgattttgacaaagatggtctaaaattccatctagactatattatcaaaatttggaaacttcaaaaacgatattagaatttatacgaatatcgttctctaaatgtcacaatcaagtctcgcatgttcagcaatttattgtcgtactttatatcgtgttcattaacgatatcttgcaaaatagtaatgattctatcttccttcgatagatattcttcagagattattgtcttatattctttcttgttatccgatatgaatttgataagactttgaacattattgatacccgtctgtttaattttttctacagatattttagttttggcagattctatcgtatctgtcaatagacatccaacatcgacattcgacgtcaattgtctataaatcaacgtataaattttagaaataacattagcgaattgttgtgcgttgatgtcgttattctgaaacagtatgattttaggtagcattttcttaacaaagagaacgtatttattgttactcagttgaacagatgatatatccagattactaacgcatctgattccgtataccaaactttcagaagaaatggtgtacaattgtttgtattcattcaatgtctctttttcagaaattagtttagagtcgaatactgcaataattttcaagagatagttttcatcagataagattttatttagtgtagatatgataaaactattgttttgttggagaacttgatacgccgcgttctctgtagtcgacgctctcaaatgggaaacaatctccattatttttttggaatcggatacaatatcttcggtatcttgacgcagtctagtatacatagagttaagagagattagagtttgtacattaagcaacatgtctctaaatgtggctacaaacttttcctttttcacatcatctagtttattatataccgatttcacaacggcaccagatttaaggaaccagaatgaaaaactctgataactacaatatttcatcatagttacgattttatcatcttctatagttggtgtaatagcgcatacctttttctccaagactggaaccaacgtcataaaaatgtttaaatcaaaatccatatcaacatctgatgcgctaagaccagtctcgcgttcaagattatctttactaatggtgacgaactcatcgtataaaactctaagtttgtccattatttatttacagatttagttgtttaatttatttgtgctcttccagagttgggatagtatttttctaacgtcggtattatattattaggatctacgttcatatgtatcataatattaatcatccacgttttgataaatctatctttagcttctgaaataacgtatttaaacaaaggagaaaaatatttagctacggcatcagacgcaataacattttttgtaaatgtaacgtatttagacgacagatcttcgttaaaaagttttccatctatgtagaatccatcggttgttaacaccattcccgcgtcagattgaataggagtttgaatagtttgttttggaaatagatccttcaataacttatagttgggtgggaaaaaatcgattttatcactagactctttcttttttactatcattacctcatgaactatttcttgaatgagtatatgtattttctttcctatatcggacgcgttcattggaaaatataccatgtcgttaactataagaatatttttatcctcgtttacaaactgaataatatcagatgtagttcgtaaacgaactatatcatcaccagcacaacatctaactatatgatatccactagtttcctttagccgtttattatcttgttccatattagcagtcattccatcatttaagaaggcgtcaaagataatagggagaaatgacattttggattctgttacgactttaccaaaattaaggatatacggacttactatctttttctcaacgtcaatttgatgaacacacgatgaaaatgtgcttctatgagattgatcatgtagaaaacaacaagggatacaatatttccgcatatcatgaaatatattaagaaatcccaccttattatatttccccaaaggatccatgcacgtaaacattatgccgttatcattaataaagacttctttctcatcggatctgtaaaagttgttactgatttttttcattccaggatctagataattaataatgatgggttttctattcttattctttgtattttggcatatcctagaccagtaaacagtttccactttggtaaaatcagcagacttttgaacgctattaaacatggcattaatggcaataactaaaaatgtaaaatatttttctatgttaggaatatggtttttcactttaatagatatatggtttttggccaaaatgatagatatttttttatccgaggatagtaaaatattattagtcgccgtctctataaaaatgaagctagtctcgatatccaattttattctagaattgataggagtcgccaaatgtaccttatacgttatatctcccttgatgcgttccatttgtgtatctatatcggacacaagatctgtaaatagttttacgttattaatcatcacggtatcgccgtcgctagataacgctaatgtaccatccaagtcccaaatggagagatttaactgttcatcgtttagaataaaatgattaccggtcatattaataaagtgttcatcgtatctagataacaacgacttataattaatgtccaagtcttgaactcgctgaatgatcttttttaacccagttagttttagattggtacgaaatatattgttaaactttgattctacagtaatgtccaaatctagttgtggaaatacttccatcaacattgtttcaaacttgataatattattatctacatcttcgtacgatccaaattccggaatagatgtatcgcacgctctggccacccagataaccaaaaagtcacacgctccaggatatacattgtataaaaagctatcgttttttagtagggtttttttctgcgtgtatacgaagggattaaaaatagtattatcaacgtaactatattccaaattattcttatgagaatagataataatatcgtccttaatatctaacaaatttcctaaatatccctttaattgagtcattcgaagcgtcaatagaatatgtctcttaactatttccggctgttgtatatttaaatgacttcgtaaaaaataatatatgggcgacttctcatctatgtaatcatatggagtgagatatagggctcgttctacctcctgccccttacccacctgtaataccaattgcggacttactatatatcgcatatttatatcgtggggtaaagtgaaaatctactaccgatgatgtaagtcttacaatgttcgaaccagtaccagatcttaatttggaggcctccgtagaactaggggaggtaaatatagatcaaacaacacctatgataaaggagaatagcggttttatatcccgcagtagacgtctattcgcccatagatctaaggatgatgagagaaaactagcactacgattctttttacaaagactttattttttagatcatagagagattcattatttgttcagatgcgttgacgctgtaaaagacgtcactattaccaaaaaaaataacattatcgtggcgccttatatagcacttttaactatcgcatcaaaaggatgcaaacttacagaaacaatgattgaagcattctttccagaactatataatgaacatagtaagaaatttaaattcaactctcaagtatccatcatccaagaaaaactcggataccagtttggaaactatcacgtttatgattttgaaccgtattactctacagtagctctggctattcgagatgaacattcatctggcatttttaatatccgtcaagagagttatctggtaagttcattatctgaaataacatatagattttatctaattaatctaaaatctgatcttgttcaatggagtgctagtacgggcgctgtaattaatcaaatggtaaatactgtattgattacagtgtatgaaaagttacaactggtcatagaaaatgattcacaatttacatgttcattggctgtggaatcaaaacttccaataaaattacttaaagatagaaatgaattatttacaaaattcattaacgagttaaaaaagaccagttcattcaagataagcaaacgcgataaggatacgctactaaaatattttacttaggactggagttagaatttatagacgactcatttcgtttatcattgttactattattactattactatcattattagtgttggcattattagtattcttcttgtcatcttgttcagaaatatacagcaatgctatacctaatactaaatacattatcatgctcgcaatggctctaacaacaacgaaccaaaatgaatttggtcgtagcttttgttcacaaaaatacataaagaaatgtctacataaatctatggcgccattggctacttgaaatagcgccagtcctcctacagattttaatatagctgtataacatgacatttattcatcatcaaaagagacagagtcaccatctgtcatatttagattttttttcatgtgttcaaagtatcctctactcatttcattataatagtttatcatacttagaattttaggacggatcaatgagtaagacttgactagatcgtcagtagtaatttgtgcatcgtctattctgcatccgcttcgtcgaataatgtatagcatcgctttgagattctccatagctatcaagtctttatacaatgacatggaaatatctgtgaatactttatacttctccaacatcgatgccttaacatcatcgcctactttagcattgaaaatacgttctattgtgtagatggatgtagcaagatttttaaacaacaatgccatcttacacgatgattgcctcaagtctccaatcgtttgtttagaacgattagctacagagtccaatgcttggctgactagcatattattatctttagaaattgtattcttcaatgaggcgtttatcatatctgtgatttcgttagtcatattacagtctgactgggttgtaatgttatccaacatatcacctatggatacggtacacgtaccagcatttgtaataatcctatctaagatgttgtatggcattgcgcagaaaatatcttctcctgtaatatctccactctcgataaatctactcagattattcttaaatgccttattctctggagaaaagatatcagtgtccatcatttcattaatagtatacgcagaaaagataccacgagtatcaattctatccaagatacttatcggttccgagtcacagataatggtttcctctccttcgggagatcctgcatagaaatatctaggacaatagtttctatactgtctgtaactctgataatctctaaagtcactaactgataccatgaaattgagaagatcaaacgctgaagtaattaatttttctgcctcgtttttactacaactagttttcatcaatgtagtgacgatgtattgtttagttacttttggtctaatactgatgatagagatattattgcttcccataatggatcttctagtagtcaccttaaagcccattgatgcgaatagcagatagataaagtcttggtatgactcctttctaatatagtacggactacctttgtcacccaactttatacccacataagccataacaacctctttaatagccgtttcatgaggtttatcagccatgagcctgagtagttggaagaatctcatgaatcccgtctcagaaagtcctatatgcatgatagatttatctttcctgggaaactctcgtatagtcatagatgaaatactctttaaagtttctgaaataagattagtaacagtcttacctccgactactctaggtaacaaacaaactctaataggtgttttctctgcggagataatatcagaaaggatagagcaataagtagtattattgtgattataaagaccgaatacataacaggtagaatttataaacatcatgtcctgaaggtttttagacttgtattcctcgtaatccataccgtcccaaaacatggatttggtaactttgatagccgtagatctttgttccttcgccaacaggttaaagaaattaataaagaatttgttgtttctatttatgtccacaaattgcacgtttggaagcgccacggttacattcactgcagcattttgaggatcgcgagtatgaagtacgatgttattgtttactggtatatctggaaagaaatctaccagtctaggaataagagattgatatcgcatagaaatagtaaagtttataatctcatcatcgaagagcattttgttaccattgtaataaatatccactctgtcatatgtataaatgaagtactgttcaaacatgatgagatgtttatatgttggcatagtagtgagatcgacgtttggtaatggcaatgtattaagattaactccataatgtctagcagcatctgcgatgttataagcgtcgtcaaagcggggtcgatcttgtattgttatatattgtctaacacctataagattatcaaaatcttgtctgcttaatacaccgttaacaatttttgccttgaattcttttattggtgcattaataacatccttatagaggatgttaaacaaataagtgttatcaaagttaagatctggatatttcttttctgctagaacatccattgagtcggagccatctggtttaatataaccaccgataaatctagctctgtattctgtatccgtcaatctaatattaagaaggtgttgagtgaaaggtggaagatcgtaaaagctgtgagtattaatgataggattagtttccgaactaatgttaattggggtattaataatatctatatttccagcgttaagtgtaacattaaacagttttaattcacgtgacgtggtatcaattaaataattaatgcccaatttggatatagcagcctgaagctcatcttgtttagttacggatcctaatgagttattaagcaatatatcgaacggatgaacgaaggttgttttgagtttgtcgcatactttgtaatctagacatagatgcggaagaacggtagaaactatacgaaataaatattcagagtcctctaattgatcaagagtaactattgacttaataggcatcatttatttagtattaaatgacgaccgtaccagtgacggatatacaaaacgatttaattacagagttttcagaagataattatccatctaacaaaaattatgaaataactcttcgtcaaatgtctattctaactcacgttaacaacgtggtagatagagaacataatgccgccgtagtgtcatctccagaggaaatatcctcacaacttaatgaagatctatttccagatgatgattcaccggccactattatcgaacgagtacaacctcatactactattattgacgatactccacctcctacgtttcgtagagagttattaatatcggaacaacgtcaacaacgagaaaaaagatttaatattacagtatcgaaaaatgctgaagcaataatggaatctagatctatgataacttctatgccaacacaaacaccatccttgggagtagtttatgataaagataaaagaattcagatgttagaggatgaagtggttaatcttagaaatcaacgatctaatacaaaatcatctgataatttagataattttaccaaaatactatttggtaagactccgtacaaatcaacagaagttaataagcgtatagccatcgttaattatgcaaatttgaacgggtcccccttatcagtcgaggacttggatgtttgttcggaggatgaaatagatagaatctataaaacgattaaacaatatcacgaaagtagaaaacgaaaaattatcgtcactaacgtgattattattgtcataaacattatcgagcaggcattgctaaaactcggatttgaagaaatcaaaggactgagtaccgatatcacttcagaaattatcgatgtggagatcggagatgactgcgatgctgtagcatctaaactaggaatcggtaacagtccggttcttaatattgtattgtttatactcaagatattcgttaaacgaattaaaattatttaatttaatacattcccatatccagacaacaatcgtctggattaatctgttcctgtcgtctcataccggacgacatattaatctttttattagtgggcatctttttagatggtttctttttcccagcattaactgagtcgatacctagaagatcgtgattgatctctccgaccattccacgaacttctaattggccgtctctgacggtaccataaactattttaccagcattagtaacagcttggacaatctgaccatccatcgcattgtacgatgtagtagtaactgttgttctacgtctaggagcaccagaagtatttttggagcccttggatgttgatgtagaagaagacgaggattttgattttggtttacatgtaatacattttgaactctttgattttgtatcacatgcgccggcagtcacatctgtttgagaattaagattattgttgcctcctttgacggctgcatctccaccgatttgcgctagtagatttttaagctgtggtgtaatcttattaactgtttcgatataatcatcgtaactgcttctaacggctaaattttttttatccgccatttagaagctaaaaatatttttatttatgcagaagatttaactagattatacaatgaactaatatgatccttttccagattatttacaaacttggtattttttggttctggaggaggcgaatttaaattcggacttggattcggattttgtaagttcttgatcttattatacatcgagtataggatggcgacagtaactgctacacaaataccgatcaaaagaagaataccaatcatttattgacaataacttcactattgatcaagtatgcaatatatcatcttttcactaaataagtagtaataatgattcaacaatgtcgagatatatggacgataataatttagttcatggaaatatcgctatgattggtgtgaatgactccgctaactctgtggggtgcgcagtgctttccccacatagaataaattagcattccgactgtgataataataccaagtataaacgccataatactcaatactttccatgtacgagtgggactggtagacttactaaagtcaataaaggcgaagatacacgaaagaatcaaaagaatgattccagcgattagcacgccggaaaaataatttccaatcataagcatcatgtccatttaactaataaaaattttaaatcgccgaatgaacaaagtggaatataaaccatataaaaacaatagtttgtactgcaaaaataatatctatttttgttttcgaagatatggtaaaattaaatagtagtacacagcatgttataactaacagcagcaacggctcgtaattacttatcatttactagacgaaaaggtggtgggatattttcttgctcaaataatacgaatatatcacccatccattttatgcgatgtttatatactctaatctttaatagatctatagacgacgggtttaccaacaatatagattttatcgattcatctaatttaaacccttccttaaacgtgaatgatctattatctggcataacgatgaccctacctgatgaatcggacaatgtactgggccatgtagaataaattatcaacgaattatcgtctacgaacatttatatcatttgttttaattttaggacgcgaataaatggatataaaatagaaaataacagatattacaaccagtgttatggccgcgcccaaccaggtaggcagttttattttatcttttactacaggttctcctggatgtacgtcaccaacggcggacgtagttctagtacaattagacgtaagttccgcttgggaattttttaacgctaaagagttaacgttaatcgtgcacccaacgtatttacatctagttcgttgaacatcttgattataatataaccattttctatctctagattcgtcagtgcactcatgtaaccaacataccctaggtcctaaatatttatctccggaattagattttggataattcgcgcaccaacaatttctatttcctttatgatcgttacaaaagacgtataatgccgtatccccaaaagtaaaataatcaggacgaataattctaataaactcagaacaatatctcgcatccatatgtttggagcaaatatcggaataagtagacatagccggtttccgttttgcacgtaaccattctaaacaattggggtttccaggatcgtttctacaaaatccagtcatgaaatcgtcacaatgttctgtcttgtaattattattaaatatttttggacagtgtttggtatttgtcttagaacaacattttgccacgctatcactatcgcccaggagataatccttttttataaaatgacatcgttgcccggatgctatataatcagtagcgtgttttaaatccttaatatattcaggagttacctcgttctgataatagattaatgatccaggacgaaatttgaaagaactacatggttctccatgaattaatacatattgtttagcaaattcaggaactataaaactactacaatgatctatcgacataccatctatcaaacaaaacttgggtttaatttctcccggagatgtttcataatagtacgtataactttcttctgcaaacttaacagctctattatattcaggataattaaaacctaattccatatatttgtctcgtatatctgctattcctggtgctattttgattctattaagagtaacagctgcccccattcttaataatcgtcagtatttaaactgttaaatgttggtatatcaacatctaccttatttcccgcagtataaggtttgttgcaggtatactgttcaggaatggttacatttatacttcttctatagtcctgtctttcgatgttcatcacatatgcaaagaacagaataaacaaaataatgtaagaaataatattaaatatctgtgaattcgtaaatacattgattgccataataattacagcagctacaatacacacaatagacattcccacagtgttgccattacctccacgatacatttgagttactaagcaataggtaataactaagctagtaagaggcaatagaaaagatgagataaatatcatcaatatagagattagaggagggctatatagagccaagacgaacaaaatcaaaccgagtaacgttctaacatcattatttttgaagattcccaaataatcattcattcctccataatcgttttgcatcatacctccatctttaggcataaacgattgctgctgttcctctgtaaataaatctttatcaagcactccagcacccgcagagaagtcgtcaagcatattgtaatatcttaaataactcatttatatattaaaaaatgtcactattaaagatggagtataatctttatgccgaactaaaaaaaatgacttgtggtcaacccctaagtctttttaacgaagacggggatttcgtagaagttgaaccgggatcatcctttaagtttctgatacctaagggattttacgcctctccttccgtaaagacgagtctagtattcgagacattaacaacgaccgataataaaatcactagtatcaatccaacaaatgcgccaaagttatatcctcttcaacgcaaagtcgtatctgaagtagtttctaatatgaggaaaatgatcgaatcaaaacgtcctctatacattactcttcacttggcgtgtggatttggtaagactattaccacgtgttatcttatggctacacacggtagaaaaaccgtcatttgcgtacccaataaaatgttaatacatcaatggaagacacaggtagaggcagtcggattggaacataagatatccatagatggagtaagtagtctattaaaggaactaaagactcaaagtccggatgtattaatagtagtcagtagacatctgacaaacgatgccttttgtaaatatatcaataagcattatgatttgttcatcttggatgaatcacatacgtataatctgatgaacaatacagcagttacaagatttttagcgtattatcctccgatgatgtgttattttttaactgctacacctagaccatctaaccgaatttattgtaacagtattattaatattgccaagttatccaatctaaaaaaaactatctatgcagtagatagtttttttgagccatattccacagataatattagacatatggtaaaacgactagatggaccatctaataaatatcatatatataccgagaagttattatctgtagacgagcctagaaatcaacttattcttgataccctggtagaagaattcaagtcaggaactattaatcgcattttagttattactaaactacgtgaacatatggtattattctacaaacgattattagattttttcggaccagaggttgtatttataggagacgcccaaaatagacgtactccagatatggtcaaatcaatcaaggaactaaatagatttatattcgtatccaccttattttattccggtactggtttagatattcctagtttggattcgttgttcatttgctcggcagtaatcaacaatatgcaaatagagcaattactagggagggtatgtcgagaaacagaactattagataggacggtatatgtatttcctaacacatccatcaaagaaataaagtacatgataggaaatttcatgcaacgaattattagtctgtctgtagataaactaggatttaaacaaaaaagttatcggaaacatcaagaatccgatcccacttctgtatgtacaacatcctccagagaagaacgtgtattaaatagaatatttaactcgcaaaatcgttaagaagtttaagcgacgatccgcatgctgcgcaggccagtgtattacccctcatagtattaatataatccaatgatacttttgtgatgtcggaaatcttaaccaatttagactgacaggcagaacacgtcatgcaatcatcatcgtcatcgataactgtagtcttgggcttctttttgcgactcttcattccggaacgcacattggtgctatccatttaggtagtaaaaaataagtcagaatatgccctataacacgatcgtgcaaaacctggtatatcgtctctatctttatcacaatatagtgtatcgacatttttattattattgacctcgtttatcttggaacatggaatgggaacatttttgttatcaacggccatctttgccttaattccagatgttgtaaaattataactaaacagtctatcatcgacacaaatgaaattcttgtttagacgtttgtagtttacgtatgcggctcgttcgcgtctcattttttcagatattgcaggtactataatattaaaaataagaatgaaataacataggattaaaaataaagttatcatgacttctagcgctgatttaactaacttaaaagaattacttagtctgtacaaaagtttgagattttcagattctgcggctatagaaaagtataattctttggtagaatggggaacatctacttactggaaaataggcgtgcaaaaggtagctaatgtcgagacgtcaatatctgattattatgatgaggtaaaaaataaaccgtttaatattgatccgggctattacattttcttaccggtatattttgggagcgtctttatttattcgaagggtaaaaatatggtagaacttggatctggaaactcttttcaaataccagatgatatgcgaagtgcgtgtaacaaagtattagacagcgataacggaatagactttctgagatttgttttgttaaacaatagatggataatggaagatgctatatcaaaatatcagtctccagttaatatatttaaactagctagtgagtacggattaaacatacccaaatatttagaaattgaaatagaggaagacacattatttgacgacgagttatactctattatagaacgctctttcgatgataaatttccaaaaatatccatatcgtatattaagttgggagaacttagacggcaagttgtagactttttcaaattctcattcatgtatattgagtccatcaaggtagatcgtataggagataatatttttattcctagcgttataacaaaatcaggaaaaaagatattagtaaaagatgtagaccatttaatacgatccaaggttagagaacatacatttgtaaaagtaaaaaagaaaaacacattttccattttatacgactatgatggaaacggaacagaaactagaggagaagtaataaaacgaattatagacactataggacgagactattatgttaacggaaagtatttctctaaggttggtagtgcaggcttaaagcaattgactaataaattagatattaatgagtgcgcaactgtcgatgagttagttgatgagattaataaatccggaactgtaaaacgaaaaataaaaaaccaatcagcatttgatttaagcagagaatgtttgggatatccagaagcggattttataacgttagttaataacatgcggttcaaaatagaaaattgtaaggttgtaaatttcaatattgaaaatactaattgtttaaataacccgagtattgaaactatatatggaaactttaaccagttcgtctcaatctttaatgtcgtcaccgatgtcaaaaaaagattattcgagtgaaataatatgcgcctttgatataggtgcaaaaaatcctgccagaactgttttagaagtcaaggataactccgttagggtattggatatatcaaaattagactggagttctgattgggaaaggcgcatagctaaagatttgtcacaatatgaatacactacagttcttctagaacgtcagcctagaaggtcgccgtatgttaaatttatctattttattaaaggctttttatatcatacatcggctgccaaagttatttgcgtctcgcctgtcatgtctggtaattcatatagagatcgaaaaaagagatcggtcgaagcatttcttgattggatggacacattcggattgcgagactccgttccggatagacgcaaattagacgatgtagcggatagtttcaatttggctatgagatacgtattagataaatggaatactaattatacaccttataataggtgtaaatctagaaattacataaaaaaaatgtaataacgttagtaacgccattatggataatctatttacctttctacatgaaatagaagatagatatgccagaactatttttaactttcatctaataagttgcgatgaaataggagatatatatggtcttatgaaagaacgcatttcctcagaggatatgtttgataatatagtgtataataaagatatacatcctgccattaagaaactagtgtattgcgacatccaacttactaaacacattattaatcagaatacgtatccggtatttaacgattcttcacaagtgaaatgttgtcattatttcgacataaactcagataatagcaatattagctctcgtacagtagagatatttgagagggaaaagtcatctcttgtatcatatattaaaactaccaataagaagagaaaggtcaattacggcgaaataaagaaaactgttcatggaggcactaatgcaaattacttttccggtaaaaagtctgacgagtatctgagtactacagttagatccaacattaatcaaccttggatcaaaaccatctctaagaggatgagagttgatatcattaatcactctatagtaacgcgtggaaaaagctctatattacaaactatagaaattatttttactaatagaacatgtgtgaaaatattcaaggattctactatgcacattattctatccaaggacaaggatgaaaaggggtgtatacacatgattgacaaattattctatgtctattataatttatttctgttgttcgaagatatcatccaaaacgagtactttaaagaagtagctaatgttgtaaaccacgtactcacggctacggcattagatgagaaattattcctaattaagaaaatggctgaacacgatgtttatggagttagcaatttcaaaatagggatgtttaacctgacatttattaagtcgttggatcataccgttttcccctctctgttagatgaggatagcaaaataaagttttttaaggggaaaaagctcaatattgtagcattacgatctctggaggattgtataaattacgtgactaaatccgagaatatgatagaaatgatgaaggaaagatcgactattttaaatagcatagatatagaaacggaatcggtagatcgtctaaaagaattgcttctaaaatgaaaaaaaacactaattcagaaatggatcaacgactagggtataagtttttggtgcctgatcctaaagccggagttttttatagaccgttacatttccaatatgtatcgtattctaattttatattgcatcgattgcatgaaatcttgaccgtcaagcggccactcttatcgtttaagaataatacagaacgaattatgatagaaattagcaatgttaaagtgactcctccagattactcacctataatcgcgagtattaaaggtaagagttatgacgcattagccacgttcactgtaaatatctttaaagaggtaatgaccaaagagggtatatccatcactaaaataagtagttatgagggaaaagattctcatttgataaaaattccgctactaataggatacgggaataaaaatccacttgatacagccaagtatcttgttcctaatgtcataggtggagtctttatcaataaacaatctgtcgaaaaagtaggaattaatctagtagaaaagattacaacatggccaaaatttagggttgttaagccaaactcattcactttctcgttttcctccgtatcccctcctaatgtattaccgacaagatatcgccattacaagatatctctggatatatcacaattggaagcgttgaatatatcatcgacaaagacatttataacggtcaatattgttttgctgtctcaatatttatctagagtgagtctagaattcattagacgtagtttatcatacgatatgcctccagaagttgtctatctagtaaacgcgataatagatagtgctaaacgaattactgaatctattactgactttaatattgatacatacattaatgacctggtggaagctgaacacattaaacaaaaatctcagttaacgattaacgagttcaaatatgaaatgctgcataactttttacctcatatgaactatacacccgatcaactaaagggattttatatgatatctttactaagaaagtttctctactgtatcttccacacttctagatatccagatagagattcgatggtttgtcatcgcatcctaacgtacggcaaatattttgagacgttggcacatgatgaattagagaattacataggcaacatccgaaacgatatcatgaacaatcacaagaacagaggcacttacgcggtaaacattcatgtactaacaactcccggacttaatcacgcgttttctagcttattgagtggaaagttcaaaaagtcagacggtagttatcgaacacatcctcactattcatggatgcagaatatttctattcctaggagtgttggattttatccggatcaagtaaagatttcaaagatgttttctgtcagaaaataccatccaagtcaatatctttacttttgttcatcagacgttccggaaagaggtcctcaggtaggtttagtatctcaattgtctgtcttgagttccattacaaatatactaacgtctgagtatttggatttggaaaagaaaatttgtgagtatatcagatcatattataaagatgatataagttactttgaaacaggatttccaatcactatagaaaatgctctagtcgcatctcttaatccaaatatgatatgtgattttgtaactgactttagacgtagaaaacggatgggattcttcggtaacttggaggtaggtattactttagttagggatcacatgaatgaaattcgcattaatattggagcgggaagattagtcagaccattcttggttgtggataacggagagctcatgatggatgtgtgtccggagttagaaagcagattagacgacatgacattctctgacattcagaaagagtttccgcatgtcatcgaaatggtagatatagaacaatttacttttagtaacgtatgtgaatcggttcaaaaatttagaatgatgtcaaaggatgaaagaaagcaatacgatttatgtgactttcctgccgaatttagagatggatatgtagcatcttcactagtgggaatcaatcacaattctggacccagagctattcttggatgtgctcaagctaaacaagctatctcttgtctgagttcggatatacgaaataaaatagacaatggaattcatttgatgtatccagagaggccaatcgtgattagtaaggctttagaaacttcaaagattgcggctaattgcttcggccaacatgttactatagcattaatgtcgtacaaaggtatcaatcaagaggatggaattatcatcaaaaaacaatttattcagagaggcggtctcgatattgttacagccaagaaacatcaagtagaaattccattggaaaactttaataacaaagaaagagataggtctaacgcctattcaaaattagaaagtaatggattagttagactgaatgctttcttggaatccggagacgctatggcacgaaatatctcatcaagaactcttgaagatgattttgctagagataatcagattagcttcgatgtttccgagaaatataccgatatgtacaaatctcgcgttgaacgagtacaagtagaacttactgacaaagttaaggtacgagtattaaccatgaaagaaagaagacccattctaggagacaaatttaccactagaacgagtcaaaagggaacagtcgcgtatgtcgcggatgaaacggaacttccatacgacgaaaatggtatcacaccagatgtcattattaattctacatccatcttctctagaaaaactatatctatgttgatagaagttattttaacagccgcatattctgctaagccgtacaacaataagggagaaaaccgacctgtctgttttcctagtagtaacgaaacatccatcgatacatatatgcaattcgctaaacaatgttatgagcattcaaatccgaaattgtccgatgaagaattatcggataaaatcttttgtgaaaagattctctatgatcctgaaacggataagccttatgcatccaaagtattttttggaccaatttattacttgcgtctgaggcatttaactcaggacaaggcaaccgttagatgtagaggtaaaaagacgaagctcattagacaggcgaatgagggacgaaaacgtggaggaggtatcaagttcggagaaatggagagagactgtttaatagcgcatggtgcagccaatactattacagaagttttgaaagattcggaagaagattatcaagatgtgtatgtttgtgaaaattgtggagacatagcagcacaaatcaagggtattaatacatgtcttagatgttcaaaacttaatctctctcctctcttaacaaaaattgataccacgcacgtatctaaagtatttcttactcaaatgaacgccagaggcgtaaaagtcaaattagatttcgaacgaaggcctccttcgttttataaaccattagataaagttgatctcaagccgtcttttctggtgtaatattctagtttggtagtagatacatatcaatatcatcaaattcgagatccgaattataaaatgggcgtggattgttaactatagaatcggacgtctgatattcgaaaatctgtggagtttcaggttttggtggaggtgtaactgctacttgggatactgaagtctgatattcagaaagctgtggatgttctggttcggcatccaccgatggtgtcacatcactaatcggttcggtaacgtctgtggatggaggtgctacttctacagaacctgtagcctcagttgtcaacggagatacatttttaatgcgagaaaatgtataatttggtaatggtttcttatgtggatctgaagaagaggtaagatatctactagaaagataccgatcacgttctagttctcttttgtagaacttaactttttctttctccgcatctagttgatattccaacctcttcacgttactacgttcagattccaattcacgttcgcatgggttacctccgcagtttttacgagcgatttcacgttcagccttcatgcgtctctccctctctctatcgagtttatcagagcagtctttctgaaggcgatcgaactccataaatttctccaacgctttgattgtttccatagatttccgaagttcagcttttaggactgtgattctttttctttcgaattcacagctggatgtacaaccgtttccattaccgccatctctaagtttcttttctagatcggcaacatttcatccccatgccttttacattcctcgagtctactgtcgtcgaaatatcgttccagctccttttcgacatcaataactttagcacgttgtctctcaagctctcttttgtagttatctgattccctggcacgtttaagatcttcatgcaattgagtcagctcttaacttcctctcttgcttcttcgtcatagtacgcgcaatcactgtgagatccattgttaccacgtctacactcggcgagctcgcgtttaagagattcaatttcccgtttgtattggtccatgtttccattgctaccaccattagatttacaggctgctagttgtcgttcgagatcagaaatacgggttttcttggaattgatttcgtcgatgtacttggcatcgaaacacttattaagttctttttccaattctacgattttatttctttcgcgagtcaattccctcctgtagtaactatctgttttgtcagattcacgctctctacgtagactttcttgcaagttactaatttgttccctagcacgtccgagtttagttttatatgctgaatagagttctgattcatcctttgagcagatctctagcgatcgtttaagattcctaattctagtctttagcctatttacctcctcagaagatgttccgttaccgttgcgtttacactcgttaagctgtctatcaagatccatgattctatctctaagacgttgcatctctctttccatatcagcattgctttcattattacgtctgcagtcactcaactgtctttcaatatctgagattctatctctaagacgtcgcatctctctctgtttcggcattggtttcattattacgtttacagtcgttcaactgtctttcaagatctgatattctagattggagtctgctaatctctgtagcattttcacggcattcactcagttgtctttcaagatctgaaattttagattggagtctgctaatctctgtaagatttcctcctccgctctcgatgcagtcggtcaacttattctctagttctctaatacgcgaacgcagtgcatcaacttcttgcgtgtcttcctggttgcgtgtacattcatcgagtctagattcgagatctctaacgcgtcgtcgttcttcctcaagttctctgcgtactacagaaagcgtgtccttatcttgttgatatttagcaatttctgattctagagtactgattttgcttacgtagttactaatatttgtcttggccttatcaagatcctccttgtatttgtcgcattccttgatatccctacgaagtctggacagttcccattcgacattacgacgtttatcgatttcagctcggagatcgtcatcgcgttgttttagccacatacgactgagttcaagttctcgttgacaagatccatctacttttccattcctaatagtatccagttccttttctagttctgaacgcatttctcgttccctatcaagcgattctctcaattctcggatagtcttcttatcaatttctaataaatctgaaccatcatctgtcccattttgaatatccctgtgttctttgatctcttttgtaagtcggtcgattctttcggttttataaacagaatccctttccaaagtcctaatcttactgagtttatcactaagttctgcattcaattcggtgagttttctcttggcttcttccaactctgttttaaactctccactatttccgcattcttcctcgcatttatctaaccattcaattagtttattaataactagttggtaatcagcgattcctatagccgttcttgtaattgtgggaacataattaggatcttctaatggattgtatggcttgatagcatcatctttatcattattagggggatggacaaccttaattggttggtcctcatctcctccagtagcgtgtggttcttcaataccagtgttagtaataggcttaggcaaatgcttgtcgtacgcgggcacttcctcatccatcaagtatttataatcgggttctacttcagaatattcttttctaagagacgcgacttcgggagttagtagaagaactctgtttctgtatctatcaacgctggaatcaatactcaagttaaggatagcgaatacctcatcgtcatcatccgtatcttctgaaacaccatcatatgacatttcatgaagtctaacgtattgataaatagaatcagatttagtattaaacagatccttaacctttttagtaaacgcatatgtatattttagatctccagatttcataatatgatcacatgccttaaatgtcagtgcttccatgatataatctggaacactaatgggtgacgaaaaagatacagcaccatatgctacgttgataaataaatctgaaccactaagtagataatgattaatgttaagaaagaggaaatattcagtgtataggtatgtcttggcgtcatatcttgtactaaacacgctaaacagtttgttaatgtgatcaatttccaatagattaattagagcagcgggaataccaacaaacatattaccacatccgtattttctatgaatatcacatatcatgttaaaaaatcttgatagaagagcgaatatctcgtctgacttaatgagtcgtagttcagcagcaacataagtcataactgtaaatagaacatactttcctgtagtgttgattctagactccacatcaacaccattattaaaaatagttttatatacatctttaatctgctctccgttaatcgtcgaacgttctagtatacggaaacactttgatttcttatctgtagttaatgacttagtgatatcacgaagaatattacgaattacatttcttgtttttcttgagagacctgattcagaactcaactcatcgttccatagtttttctacctcagtggcgaaatctttggagtgcttggtacatttttcaataaggttcgtgacctccatttattataaaaaatttattcaaaacttaactacaatcgggtaattataaaatcgtagatctcccatgtggcggaatactaccatctatcgcatgtggatggacagtaggtaatggccatgggaacagtaatgtttgcatatttatctttcttgccagtattactgcatattgtcccaatgtttcgatgtgatgttctaacctatcaactgccgctgtatcacaacaatagtgtccgatgaaattaagattatgatccaatgtgtttaatatatgattatcaagtcttatacgatccgcgtcttttttgacaggatcaggttcttctacaggaagaagtttcggcctcttatgatattcatgtctgggaaacggtggtctagggtgaggctccggtatcggagtgggttttggattataatcatcatcgtctatgacatcatcatcatcttcgacttcgatatttattttgctatcttgatgatgtcctgtatcagttgcattttcagcactcgactgaatattagcgcattcattgtctattattaccatatttctaaacccaaaatgtatgtgttgaacatcagtactatcgttgatgagtcttatagcatgaattcgcttatcgttatcgggtttatcttctgtcaccttagcaattccttttttattaaactctacataatcatatccatttctattgtttgttctaatataaacgagtatagcatcattgctaaatttttcaatagtatcaaaaacagaatatcctaaaccatataatatatattcaggaacactcaaactaaatgtccaggattctcctaaatacgtaaactttaatagtgcgaaatcattcaaaaatctaccacttatagatagatagtacataaatgcgtatagtagtctacctatctctttattatgaaaaccggcattacgatcatatatgtcgtgatatacctgtgatccgtttacgttaaaccataaatacatgggtgatcctataaacatgaatttatttctaattctcagagctatagttaattgaccgtgtaatatttgcttacatgcatacttgatacgcttattaataagatttttatcattgctcgttatttcagaatcgtatatataaggagtaccatcgtgattcttaccagatattatacaaaatactatatataaaatatattgacccacgttagtaatcatataaatgtttaacgttttaaattttgtattcaatgatccattatcatacgctatcatggtcttgtaatattcattctttaaaatataatattgtgttagccattgcattggagctcctaatggagattttctattctcatccattttaggataggctttcataaagtccctaataacttcgtgaataatgtttctatgttttctactgatgcatgtatttgcttcgatttttttatcccatgtttcatctatcatagatttaaacgcagtaatgctcgcaacattaacatcttgaaccgttggtacaattccgttccataaatttataatgttcgccatttatataactcattttttgaatatacttttaattaacaaaagagttaagttactcatatggacgccgtccagtctgaacatcaatctttttagccagagatatcatagccgctcttagagtttcagcgtgattttccaacctaaatagaacttcatcgttgcgtttacaacacttttctatttgttcaaactttgttgttacattagtaatctttttttccaaattagttagccgttgtttgagagtttcctcattgtcgtcttcatcggctttaacaattgcttcgcgtttagcctctggctttttagcagcctttgtagaaaaaaattcagttgctggaattgcaagatcgtcatctccggggaaaagagttccgtccatttaaagtacagattttagaaactgacactctgcgttatttatatttggtacaacacatggattataaatattgatgttaataacatcagaaaatgtaaagtctatacattgttgcatcgtgttaaattttctaatggatctagtattattgggtccaacttctgcctgaaatccaaatatggaagcggatacaaaaccgtttcctggataaaccacacatctccacttttgctttacatcagaaattgtgtcgttgacatcttgaactctcctatctaatgccggtgttccacctatagattttgaatattcgaatgctgcatgagtagcattaaattccttaatattgccataattttcatatattgagtaaccctggataaaaagtaaacacaccgcagccgtcgctaccacaataaaaaaaattgatagagagttcatttataatctattagaagctgacaaaatttttttacacgcatcagacaatgctttaataaatagttcaacatctacttttgtcatatcgaaccgatggtatgattctaacctagaattacatccgaaaaagttgactatgttcatagtcattaagtcattaacaaacaacattccagactctggattataagacgatactgtttcgtcacaattacctaccttaatcatgtgattatgaatattggctattagagcaccttctaagaaatctataatatctttgaaacacgatttaaaatcaaaccacgaatatacttctacgaagaaagttagtttacccataggagaaataactataaatggagatctaaatacaaaatccggatctatgatagttttaacattattatattctctattaaatacctccacatctaaaaatgttaattttgaaactatgtcttcgtttattaccgtacctgaactaaacgctataagctctattgtttgagaactctttaaacgatattcttgaaatacatgtaacaaagtttcctttaactcggtcggtttatctaccatagttacagaatttgtatccttatctataatataataatcaaaatcgtataaagttatataattatcgcgttcagattgggatcttttcaaatagactaaaaaccccatttctctagtaagtatcttatgtatatgtttgtaaaatatcttcatggtgggaatatgctctaccgcagttagccattcctcattgacagcggtagatgtattagacaaaactattccaatgtttaacaagggccattttacgagattattaaatccttgtttgataaatgtagccaatgagggttcgagttcaacgacgattgaattctcttcccgcggatgctgcatgatgaacgacgggatgttgttcgattgatttggaattctttttcgactttttgtttatattaaatattttaaaatttatagcggatagcaattcatgtaccacggataatgtagacgcgtattgcgcatcgatatctttattattagataaatttatcaataaatgtgagaagtttgcctcgttaaggtcttccatttaaatattatataaacatttgtgtttgtatcttattcgtcttttatggaatagttttttactagtaaagctgcaattacacactttgtccgtaaaacataaatataaacaccagcttttatcaatcgttccaaaaagtcgacggcggacatttttaacatggcatctattttaaatacacttaggtttttggaaaaaacatcattttataattgtaacgattcaataactaaagaaaagattaagattaaacataagggaatgtcatttgtattttataagccaaagcattctaccgttgttaaatacttgtctggaggaggtatatatcatgatgatttggttgtattggggaaggtaacaattaataatctaaagatgatgctattttacatggatttatcatatcatggagtgacaagtagtggagcaatttacaaattgggatcgtctatcgatagactttctctaaataggactattgttacaaaagttaataattatgatgatacattttttgacgacgatgattgatcgctattgcacaattttgtttttgtactttctaatatagtgtttaggttctttttcatatgagaatattgatttactaaaatatctatgtttaacttttgttctatgacgtccttatcggcggtatcggtacatatacgtaattcaccttcacaaaatacggagtcttcgataataatagccaatcgattattggatctagctgtctgtatcatattcaacatgtttaatatatcctttcgtttcccctttacaggcatcgatcgtagcatattttccgcgtctgatatggaaatgttaaaactacaaaaatgcgtaatgttagcccgtcctaatattggtacgtgtctataagtttggcatagtagaataatagacgtgtttaaatgccttccaaagtttaagaattctattagagtattgcattttgatagtttatcgcctacatcatcaaaaataagtaaaaagtgtgctgattttttatgattttgtgcgacagcaatacatttttctatgttacttttagttcgtatcagattatattctagagattcctgactactaacgaaattaatatgatttggccaaatgtatccatcataatctgggttataaacgggtgtaaacaagaatatatgtttatattttttaactagtgtagaaaacagagatagtaaatagatagtttttccagatccagatcctcctgttaaaaccattctaaacggcatttttaataaattttctcttgaaaattgtttttcttggaaacaattcataattatatttacagttactaaattaatttgataataaatcaaaatatggaaaactaaggttgttagtagggaggagaacaaagaaggcacatcgtgatataaataacatttattatcatgatgacaccagaaaacgacgaagagcagacatctgtgttctccgctactgtttacggagacaaaattcagggaaagaataaacgcaaacgcgtgattggtctatgtattagaatatctatggttatttcactactatctatgattaccatgtccgcgtttctcatagtgcgcctaaatcaatgcatgtctgctaacgaggctgctattactgacgccgctgttgccgttgctgctgcatcatctactcatagaaaggttgcgtctagcactacacaatatgatcacaaagaaagctgtaatggtttatattaccagggttcttgttatatattacattcagactaccagttattctcggatgctaaagcaaattgcactgcggaatcatcaacactacccaataaatccgatgtcttgactacctggctcattgattatgttgaggatacatggggatctgatggtaatccaattacaaaaactacatccgattatcaagattctgatgtatcacaagaagttagaaagtatttttgtgttaaaacaatgaactaatatttatttttgtacattaataaatgaaatcgcttaatagacaaactgtaagtaggtttaagaagttgtcggtgccggccgctataatgatgatactctcaaccattattagtggcataggaacatttctgcattacaaagaagaactgatgcctagtgcttgcgccaatggatggatacaatacgataaacattgttatttagatactaacattaaaatgtctacagataatgcggtttatcagtgtcgtaaattacgagctagattgcctagacctgatactagacatctgagagtattgtttagtattttttataaagattattgggtaagtttaaaaaagaccaatgataaatggttagatattaataatgataaagatatagatattagtaaattaacaaattttaaacaactaaacagtacgacggatgctgaagcgtgttatatatacaagtctggaaaactggttaaaacagtatgtaaaagtactcaatctgtactatgtgttaaaaaattctacaagtgacaacaaaaaatgaattaataataagtcgttaacgtacgccgccatggacgccgcgtttgttattactccaatgggtgtgttgactataacagatacattgtatgatgatctcgatatctcaatcatggactttataggaccatacattataggtaacataaaaactgtccaaatagatgtacgggatataaaatattccgacatgcaaaaatgctactttagctataagggtaaaatagttcctcaggattctaatgatttggctagattcaacatttatagcatttgtgccgcatacagatcaaaaaataccatcatcatagcatgcgactatgatatcatgttagatatagaagataaacatcagccattttatctattcccatctattgatgtttttaacgctacaatcatagaagcgtataacctgtatacagctggagattatcatctaatcatcaatccttcagataatctgaaaatgaaattgtcgtttaattcttcattctgcatatcagacggcaatggatggatcataattgatgggaaatgcaatagtaattttttatcataaaagttgtaaagtaaataataaaacaataaatattgaactagtagtacgtatattgagcaatcagaaatgatgctggtacctcttatcacggtgaccgtagttgcgggaacaatattagtatgttatatattatatatttgtaggaaaaagatacgtactgtctataatgacaataaaattatcatgacaaaattaaaaaagataaagagttctaattccagcaaatctagtaaatcaactgatagcgaatcagactgggaggatcactgtagtgctatggaacaaaacaatgacgtagataatatttctaggaatgagatattggacgatgatagcttcgctggtagtttaatatgggataacgaatccaatgttatggcgcctagcacagaacacatttacgatagtgttgctggaagcacgctgctaataaataatgatcgtaatgaacagactatttatcagaacactacagtagtaattaatgaaacggagactgttgaagtacttaatgaagataccaaacagaatcctaactattcatccaatcctttcgtaaattataataaaaccagtatttgtagcaagtcaaatccgtttattacagaacttaacaataaatttagtgagaataatccgtttagacgagcacatagcgatgattatcttaataagcaagaacaagatcatgaacacgatgatatagaatcatcggtcgtatcattggtgtgattagtttcctttttataaaattgaagtaatatttagtattattgctgccgtcacgttgtacaaatggagatattccctgtattcggcatttctaaaattagcaattttattgctaataatgactgtagatattatatagatacagaacatcaaaaaattatatctgatgagatcaatagacagatggatgaaacggtacttcttaccaacatcttaagcgtagaagttgtaaatgacaatgagatgtaccatcttattcctcatagattatcgacgattatactctgtattagttctgtcggaggatgtgttatctctatagataatgacatcaatggcaaaaatattctaacctttcccattgatcatgctgtaatcatatccccactgagtaaatgtgtcgtagttagcaagggtcctacaaccatattggttgttaaagcggatatacctagcaaacgattggtaacatcgtttacaaacgacatactatatgtaaacaatctgtcactgattaattatttgccgttgtctgtattcattattagacgagtcaccgactatttggatagacacatatgcgatcagatatttgctaataataagtggtattcccttataaccatcgacgataagcaatatcctattccatcaaactgtataggtatgtcctctgccaagtacataaattctagcatcgagcaagatactttaatccatgtttgtaacctcgagcatccgttcgactcagtatacaaaaaaatgcagtcgtacaattctctacctatcaaggaacaaatattgtacggtagaattgataatataaatatgagcattagtatttctgtggattaatagatttctagtatggggatcattaatcatctctaatctctaaatacctcataaaacgaaaaaaaagctattatcaaatactgtacggaatggattcattctcttctctttttatgaaactctgttgtatatctactgataaaactggaagcaaaaaatctgatagaaagaataagaataagatcaaggattatatggaacacgattattataaaataacaatagttcctggttcctcttccacgtctactagctcgtggtattatacacatgcctagtaatagtctctttgcgttgacggaaagcagactagaaataacaggctaaaatgttcagacaccataatagttcccaacccagataataacagagttccatcaacacattcctttaaactcaatcccaaacccaaaaccgttaaaatgtatccggccaattgatagtagataatgaggtgtacagcgcatgataatttacacagtaaccaaaatgaaaatactttagtaattataagaaatatagacggtaatgtcatcatcaacaatccgataatatgcctgagagtaaacattgacggataaaacaaaaatgctccgcataactctatcatggcaataacacaaccaaatacttgtaagattcctaaattagtagaaaatacaacgaatatcgatgtataagtgatctcgagaaataataagaataaagtaatgcccgtaaagataaacatcaacattgtttggtaatcattaaaccaattagtatgaagttgaactaatttcacagtagattttattccagtgttatcctcgcatgtataagtacctggtaagatatctttatattccataatcaatgagacatcactatctgataacgaatgaagtctagcactagtatgccatttacttaatattgtcgtcttggaagttttattataagttaaaatatcatggttatccaatttccatctaatatactttgtcggattatctatagtacacggaataatgatggtatcattacatgctgtatactctatggtctttgtagttgttataacaaccaacgtatagaggtatatcaacgatattctaactcttgacattttttatttatttaaaatgatacctttgttatttattttattctattttgctaacggtattgaatggcataagtttgaaacgagtgaagaaataatttctacttacttattagacgacgtattatacacgggtgttaatggggcggtatacacattttcaaataataaactaaacaaaactggtttaactaataataattatataacaacatctataaaagtagaggatgcggataaggatacattagtatgcggaaccaataacggaaatcccaaatgttggaaaatagacggttcagacgacccaaaacatagaggtagaggatacgctccttatcaaaatagcaaagtaacgataatcagtcacaacggatgtgtactatctgacataaacatatcaaaagaaggaattaaacgatggagaagatttgacggaccatgtggttatgatttatacacggcggataacgtaattccaaaagatggtttacgaggagcattcgtcgataaagatggtacttatgacaaagtttacattcttttcactgatactatcggctcaaagagaattgtcaaaattccgtatatagcacaaatgtgcctaaacgacgaaggtggtccatcatcattgtctagtcatagatggtcgacgtttctcaaagtcgaattagaatgtgatatcgacggaagaagttatagacaaattattcattctagaactataaaaacagataatgatacgatactatatgtattcttcgatagtccttattccaagtccgcattatgtacctattctatgaataccattaaacaatctttttctacgtcaaaattggaaggatatacaaagcaattgccgtctccagctcctggtatatgtttaccagctggaaaagttgttccacataccacgtttgaagtcatagaaaaatataatgtactagatgatattataaagcctttatctaaccaacctatcttcgaaggaccgtctggtgttaaatggttcgatataaaggagaaggaaaatgaacatcgggaatatagaatatacttcataaaagaaaattctatatattcgttcgatacaaaatctaaacaaactcgtagctcgcaagtcgatgcgcgactattttcagtaatggtaacttcgaaaccgttatttatagcagatatagggataggagtaggaatgccacaaatgaaaaaaatacttaaaatgtaatcttaattcgagtacaccacacgacaatgaacaaacataagacagattatgctggttatgcttgctgcgtaatatgcggtctaattgtcggaattatttttacagcgacactattaaaagttgtagaacgtaaattagttcatacaccatcaatagataaaacgataaaagatgcatatattagagaagattgtcctactgactggataagctataataataaatgtatccatttatctactgatcgaaaaacctgggaggaaggacgtaatgcatgcaaagctctaaattcaaattcggatctaattaagatagagactccaaacgagttaagttttttaagaagccttagacgaggctattgggtaggagaatccgaaatattaaaccagacaaccccatataattttatagctaagaatgccacgaagaatggaactaaaaaacggaaatatatttgtagcacaacgaatactcccaaactgcattcgtgttacactatataacaattacactacatttttatcataccactacttcggttagatgttttagaaaaaaataaatatcgccgtaccgttcttgtttttataaaaataacaattaacaattatcaaattttttctttaatattttacgtggttgaccattcttggtggtaaaataatctcttagtgttggaatggaatgctgtttaatgtttccacactcatcgtatattttgacgtatgtagtcacatcgtttacgcaatagtcagactgtagttctatcatgcttcctacatcagaaggaggaacagttttaaagtctcttggttttaatctattaccgttagttttcatgaaatcctttgttttatccacttcacattttaaataaatgtccactatacattcttttgttaattttactagatcgtcatgggtcatagaatttataggttccgtagtccatggatccaaactagcaaacttcgcgtatacggtatcgcgattagtgtatacaccaactgtatgaaaattaagaaaacagtttaataaatcaacagaaatatttaatcctccgtttgatacagatgcgccatatttatggatttcggattcacacgttgtttgtctgaggtgttcgtctagtgttgcttctacgtaaacttcgattcccatatattctttattgtcagaatcgcataccgatttatcatcatacactgtttgaaaactaaatggtatacacatcaaaataataaataataacgagtacattctgcaatattgttatcgtaattggaaaaatagtgttcgagtgagttggattatgtgagtattggattgtatattttattttatattttgtaataagaataaaatgctaatgtcaagtttattccaatagatgtcttattaaaaacatatataataaataacaatggctgaatggcataaaattatcgaggatatctcaaaaaataataagttcgaggatgccgccatcgttgattacaagactacaaagaatgttctagctgctattcctaacagaacatttgccaagattaatccgggtgaaattattcctctcatcactaatcgtaatattctaaaacctcttattggtcagaaatattgtattgtatatactaactctctaatggatgagaacacgtatgctatggagttgcttactgggtacgcccctgtatctccgatcgttatagcgagaactcataccgcacttatatttttgatgggtaagccaacaacatccagacgtgacgtgtatagaacgtgtagagatcacgctacccgtgtacgtgcaactggtaattaaaataaaaagtaatattcatatgtagtgtcaattttaaatgatgatgatgaaatggataatatccatattgacgatgtcaataatgccggtattggcatacagttcatcgatttttagatttcattcagaggatgtggaattatgttatgggcatttgtattttgataggatctataatgtagtaaatataaaatataatccgcatattccatatagatataattttattaatcgcacgttaaccgtagatgaactagacgataatgtcttttttacacatggttattttttaaaacacaaatatggttcacttaatcctagtttgattgtctcattatcaggaaacttaaaatataatgatatacaatgctcagtaaatgtatcgtgtctcattaaaaatttggcaacgagtacatctactatattaacatctaaacataagacttattctctacatcggtccacgtgtattactataataggatacgattctattatatggtataaagatataaatgacaagtataatgacatctatgattttactgcaatatgtatgctaatagcgtctacattgatagtgaccatatacgtgtttaaaaaaataaaaatgaactcttaattatgctatgctattagaaatggataaaatcaaaattacggttgattcaaaaattggtaatgttgttaccatatcgtataacttggaaaagataactattgatgtcacacctaaaaagaaaaaagaaaaggatgtattattagcgcaatcagttgctgtcgaagaggcaaaagatgtcaaggtagaagaaaaaaatattatcgatattgaagatgacgatgatatggatgtagaaagcgcgtaatactatctataaaaataagtatataataaatactttttatttacggtactcttactgtgtagtggtgataccctactcgattatttttttaaaaaaatacttattctgattcttctaaccatttccgtgttcgttcgaatgccacatcgacgtcaaagataggggagtagttgaaatctagttctgcattgttggtacgcacctcaaatgtagtgttggatatcttcaacgtatagttgttgagtagtgatggttttctaaatagaattctcttcatatcattcttgcacgcgtacatttttagcatccatcttggaatcctagatccttgttctattcccaatggtttcatcaatagaagattaaacatatcgtacgaacacgatggagagtaatcgtagcaaaagtaagcatttcctttaatcttagatcccggatactggatatattttgcagccaacacgtgcatccatgcagcatttcctacatatacccggctatgcaccgcgtcatcatcgactgtacgatacataatgttaccgtgttgcttacattgctcgtaaaagactttcgtcaatttgtctccttctccgtaaattctagtgggtcttaggcaacaagtatacaattttgctccattcatgattacggaattattggctttcataaccagttgctcggccatacgtttactttttgcgtatacatgtcctggtgatatatcataaagggtatgctcatggccgatgaatggatcaccgtgtttattgggtcctattgcttccatgctactagtatagatcaaatacttgattcctaggtccacacaagctgccaaaatagtctgtgttccataatagtttactttcatgatttcattatcggtgtattttccaaatacatccactagagcagccgtatgaataatcagatttaccccatctagcgcttctctcaccttatcaaagtcgtttatatcacattgtatatagtttataaccttaactttcgaggttattggttgtggatcttctacaatatctatgactctgatttcttgaacatcatctgcactaattaacagttttactatatacctgcctagaaatccggcaccaccagtaaccgcgtacacggccattgctgccactcataatatcagactacttattctattttactaaataatggctgtttgtataatagaccacgataatatcagaggagttatttactttgaaccagtccatggaaaagataaagttttaggatcagttattggattaaaatccggaacgtatagtttgataattcatcgttacggagatattagtcaaggatgtgattccataggcagtccagaaatatttatcggtaacatctttgtaaacagatatggtgtagcatatgtttatttagatacagatgtaaatatatttacaattattggaaaggcgttatctatttcaaaaaatgatcagagattagcgtgtggagttattggtatttcttacataaatgaaaagataatacattttcttacaattaacgagaatggcgtttgatatatcagttaatgcgtctaaaacaataaatgcattagtttacttttctactcagcaaaataaattagtcatacgtaatgaagttaatgatacacactacactgtcgaatttgatagggacaaagtagttgacacgtttatttcatataatagacataatgacaccatagagataagaggggtgcttccagaggaaactaatattggttgcgcggttagtatgacttacttgtataataagtatagttttaaactgattttagcagaatatataagacacagaaatactatatccggcaatatttattcggcattgatgacactagatgatttggctattaaacagtatggagacattgatctattatttaatgagaaacttaaagtagactccgattcgggactatttgactttgtcaactttgtaaaggatatgatatgttgtgattctagaatagtagtagctctatctagtctagtatctaaacattgggaattgacaaataaaaaatataggtgtatggcattagccgaacatatatctgatagtattccaatatctgagctatctagactacgatacaatctatgtaagtatctacgcggacacactgagagcatagaggataaatttgattattttgaagacgatgattcgtctacatgttctgccgtaaccgacagggaaacggatgtataattttttttatagcgtgaaggatatgataaaaaatataattgttgtatttatcccattccaatcaccttatatgattctgtaacacaataaaggagtcttatagatgtatagaggtcagatactggtttgataaactgtttattccacataagtatgtttgactttatggttagacccgcatactttaacaaatcactgaaaattggagttaggtattgacctctcagaatcagttgccgttctggaacattaaatgtattttttatgatatactccaacgcatttatgtgggcatacaacaagtcattactaatggaatattccaagagttttagttgtctagtatttaacaagagaagagatttcaacagactgtttatgaactcgaatgccgcctcattgtcgcttatattgatgatgtcgaattctcccaatatcatcaccgatgagtagctcatcttgttatcgggatccaagttttctaaagatgtcattaaaccctcgatcatgaatggatttatcatcatcgtttttatgttggacatgagcttagtccgtttgtccacatctatagacgacgatttctgaattatttcatatatccctctctttaactccaggaacttgtcaggatggtctactttaatatgttctcgtctaagagatgaaaatctttggatggttgcacgcgacttttctctaaaggatgacgttgcccaagatcctctcttaaatgaatccatcttatccttggacaagatggacagtctattttccttagatggtttaatatttttgttacccatgatctataaaggtagacctaatcgtctcggatgacctatatatttattttcagttttattatacgcataaattgtaaaaaatatgttaggtttacaaaaatgtctcgtggggcattaatcgtttttgaaggattggacaaatctggaaaaacaacacaatgtatgaacatcatggaatcaataccggcaaacacgataaaatatcttaactttcctcagagatccactgtcactggaaagatgatagatgactatctaactcgtaaaaaaacctataatgatcatatagttaatctattattttgtgcaaatagatgggagtttgcatcttttatacaagaacaactagaacagggaattactttaatagttgatagatacgcgttctctggagtagcgtatgccgccgctaaaggcgcgtcaatgactctcagtaagagttatgaatctggattgcctaaacccgacttagttatattcttggaatctggtagcaaagaaattaatagaaacgtcggtgaggaaatttatgaagatgttacattccaacaaaaggtattacaagaatataaaaaaatgattgaagaaggagatattcattggcaaattatttcttctgaattcgaggaagatgtaaagaaggagttgattaagaatatagttatagaggctatacacacggttactggaccagtggggcaactgtggatgtaatagtgaaattacattttttataaatagatgttagtacagtgttataaatggatgaagcatattactctggcaacttggaatcagtactcggatacgtgtccgatatgcataccgaactcgtatcaatatctcaattagttattgccaagatagaaactatagataatgatatattaaacaaggacattgtaaattttatcatgtgtagatcaaacttggataatccatttatctctttcctagatactgtatatactattatagatcaagagaactatcagaccgagttgattaattcattagacgacaatgaaattatcgattgtatagttaataagtttatgagcttttataaggataacctagaaaatatagtagatgctatcatcactctaaaatatataatgaataatccagattttaaaactacgtatgccgaagtactcggttccagaatagccgatatagatattaaacaagtgatacgtaagaatatactacaattgtctaatgatatccgcgaacgatatttgtgaaaatattaaaaaaaaatactttttttattaaatgacgtcgcttcgcgaatttagaaaattatgctgtgatatatatcacgcatcaggatataaagaaaaatctaaattaattagagactttataacagatagggatgataaatatttgatcattaagctattgcttcccggattagacgatagaatttataacatgaacgataaacaaattataaaattatatagtataatatttaaacaatctcaggaagatatgctacaagatttaggatacggatatataggagacactattaggactttcttcaaagagaacacagaaatccgtccacgagataaaagcattttaactttagaagacgtggatagtttcttaactacgttatcatccgtaactaaagaatcgcatcaaataaaattattgactgatattgcatccgtttgtacatgtaatgatttaaaatgtgtagtcatgcttattgataaagatctaaaaattaaagcgggtcctcggtacgtacttaacgctattagtcctcatgcctatgatgtgtttagaaaatctaataacttgaaagagataatagaaaattcatctaaacaaaatctagactctatatctatttctgttatgactccaattaatcccatgttagcggaatcgtgtgattctgtcaataaggcgtttaaaaaatttccatcaggaatgtttgcggaagtcaaatacgatggtgaaagagtacaagttcataaaaataataacgagtttgccttctttagtagaaacatgaaaccagtactctctcataaagtggattatctcaaagaatacataccgaaagcatttaaaaaagctacgtctatcgtattggattctgaaattgttcttgtagacgaacataatgtaccgctcccgtttggaagtttaggtatacacaaaaagaaagaatataaaaactctaacatgtgtttgttcgtgtttgactgtttgtactttgatggattcgatatgacggacattccattgtacgaacgaagatcttttctcaaagatgttatggttgaaatacccaatagaatagtattctcagagttgacgaatattagtaacgagtctcagttaactgacgtattggatgatgcactaacgagaaaattagaaggattggtcttaaaagatattaatggagtatacgaaccgggaaagagaagatggttaaaaataaagcgagactatttgaacgagggttccatggcagattctgccgatttagtagtactaggtgcctactatggtaaaggagcaaagggtggtatcatggcagtctttctaatgggttgttacgacgatgaatccagtaaatggaagacggttaccaagtgttcaggacacgatgataatacgttaagggagttgcaagaccaattaaagatgattaaaattaacaaggatcccaaaaaaattccagagtggttagtagttaataaaatctatattcccgattttgtagtagaggatccgaaacaatctcagatatgggaaatttcaggagcagagtttacatcttccaagtcccataccgcaaatggaatatccattagatttcctagatttactaggataagagaggataaaacgtggaaagaatctactcatctaaacgatttagtaaacttgactaaatcttaatagttacatacaaactgaaaattaaaataacactatttagttggtggtcgccatggatggtgttattgtatactgtctaaacgcgctagtaaaacatggcgaggaaataaatcatataaaaaatgatttcatgattaaaccatgttgtgaaagagtttgtgaaaaagtcaagaacgttcacattggcggacaatctaaaaacaatacagtgattgcagatttgccatatatggataatgcggtatccgatgtatgcaattcactgtataaaaagaatgtatcaagaatatccagatttgctaatttgataaagatagatgacgatgacaagactcctactggtgtatataattattttaaacctaaagatgccattcctgttatcatatctataggaaaggataaagatgtctgtgaactattaatctcatcagacatatcgtgtgcatgcgtggagttaaattcatatcacgtagccattcttcccatggatgtttccttttttaccaaaggaaatgcatcattgattattctcctgtttgatttctctatcgatgcggcacctctcttaagaagtgtaaccgataataatgttattatatctagacaccagcgtctacatgacgagcttccgagttccaattggttcaagttttacataagtataaagtccgactattgttctatattatatatggttgttgatggatctgtgatgcatgcgatagctgataatagaactcacgcaattattagcaaaaatatattagacaatactacgattaacgatgagtgtagatgctgttattttgaaccacagattaggattcttgatagagatgagatgctcaatggatcatcgtgtgatatgaacagacattgtattatgatgaatttacctgatgtaggcgaatttggatctagtatgttggggaaatatgaacctgacatgattaagattgctctttcggtggctggtaatttaataagaaatcgagactacattcccgggagacgaggatatagctactacgtttacggtatagcctctagataatttttttaagcacgaaataaaaaacataattttaaaccaatctatttcatactattttgtgtgatcaccatggacataaagatagatattagtatttctggtgataaatttacggtgactactaggagggaaaatgaagaaagaaaaaaatatctacctctccaaaaagaaaaaactactgatgttatcaaacctgattatcttgagtacgatgacttgttagatagagatgagatgtttactattctagaggaatattttatgtacagaggtctattaggcctcagaataaaatatggacgactctttaacgaaattaaaaaattcgacaatgatgcggaagaacaattcggtactatagaagaactcaagcagaaacttagattaaattctgaagagggagcagataactttatagattatataaaggtacaaaaacaggatatcgtcaaacttactgtatacgattgcatatctatgataggattgtgtgcatgcgtggtagatgtttggagaaatgagaaactgttttctagatggaaatattgtttacgagcgattaaactgtttattaatgatcacatgcttgataagataaaatctatactgcagaatagactagtatatgtggaaatgtcatagaaagttaaaagttaatgagagcaaaaatatataaggttgtattccatatttgttattttttctgtaatagttaaaaaatacattcgatggtctatctatcagattattatgtgttataaggtactttttctcataataaactagagtatgagtaagatagtgtttttcaaaacatataaatctaaaattgatggatgagatatacagctattaatttcgaaaatatattttaatctgataactttaaacatggatttttgatggtggtttaacgttttaaaaaaagattttgttattgtagtatatgataatattaaaagatggatataaagaatttgctgactgcatgtactattttttacattactacattggctacggcagatatacctacttcgtcactgccacacgctccggtaaacggggcatgtgacgagggagaatatcttgataagaggcataatcaatgttgtaatcagtgtccacctggagaatttgccaaggtcagatgtaatggtaacgataacacaaaatgtgaacgctgcccacctcatacatataccgcaatccccaattactctaatggatgtcatcaatgtagaaaatgcccaacaggatcatttgataaggtaaagtgtaccggaacacagaacagtaaatgttcgtgtcttcctggttggtattgcgctactgattcttcacagactgaagattgtcgagattgtataccaaaaaggagatgtccatgcggatactttggtggaatagatgaacaaggaaatcctatttgtaaatcgtgttgtgttggtgaatattgcgactacctacgtaattatagacttgatccatttcctccatgcaaactatctaaatgtaattaattatgattttgatgataatgttaccatacattatatcgctacttggttagtgtattattcagtatgaagacctattaataattacttatcttttgacgatcttgttataattataatataaaaacttatggcatagtaacttataattgctgacgcgataaattcgtaataatctgttttgttcaaaggaatctacaggcataaaaataaaaatataatttataatatactcttacagcgcgccatcatgaataacagcagtgaattgattgctgttattaatggatttagaaatagtggacgattttgtgatattagtatagttattaatgatgaaatgataaacgctcacagactcatcctatctggagcctccgaatatttttccattctgttttccaataattttatcgattctaatgaatacgaagttaatctaagtcatttagattatcaaagcgtaaacgatttgatcgattacatttatgggatacctttgagcctaactaacgataacgtgaaatatattctttcaaccgctgattttttacaaattggatctgccattactgagtgcgaaaaatacatacttaaaaatctttgttctagaaactgtatcgatttctacatatacgctgataaatataataacaagaaaatagaatcagcgtcgtttaacacaatattacaaaatattttgagactcatcaacgatgaaaactttaaatacttaacagaggaatcaatgataaaaattttaagcgatgatatgttaaatataaaaaatgaggatttcgccccactaattctcattaaatggttagagagtactcaacaaccatgcaccgtcgagttacttaaatgcctcagaatatcattgctttccccacaagttataaaatcactttatagtcatcgactggttagttcaatctacgaatgtataacattcttaaacaatatagcattcttggatgaatcatttcctagataccatagcatcgagttgatatctatcggtataagtaattcgcatgataagatttccataaactgctacaatcataaaaaaaatacatgggaaatgatatcttcacgtagatataggtgtagtttcgcagtggccgtcctggataatattatttatatgatgggtggatatgatcagtccccgtatagaagttcaaaggttatagcgtacaatacatgtacaaattcttggatatatgatataccagagctaaaatatcctcgttctaattgtgggggactggctgatgacgaatacatttattgtataggcggcatacgcgatcaggattcatcgttgacatctagtattgatagatggaagccatcaaaaccatattggcagaagtatgctaaaatgcgcgaaccaaaatgtgatatgggggttgcgatgttaaacggattaatatatgttataggtggaatcgttaaaggtgacacgtgtaccgacgcactagagagtttatcagaagatggatggatgaagcatcaacgtcttccaataaaaatgtccaatatgtcgacgattgttcatgatggcaagatttatatatctggaggttacaacaatagtagtgtagttaatgtaatatcgaatttagtccttagctataattcgatatatgatgaatggaccaaattatcatcattaaacattcctagaattaatcccgctctatggtcagcgcataataaattatatgtaggaggaggaatatctgatgatgttcgaactaatacatctgaaacatacgacaaagaaaaagattgttggacattggataatggtcacgtgttaccacgcaattatataatgtataaatgcgaaccgattaaacataaatatccattggaaaaaacacagtacacgaatgattttctaaagtatttggaaagttttataggtagttgatagaacaaaatacataattttgtaaaaataaatcactttttatactaatatgacacgattaccaatacttttgttactaatatcattagtatacgctacaccttttcctcagacatctaaaaaaataggtgatgatgcaactctatcatgtaatcgaaataatacaaatgactacgttgttatgagtgcttggtataaggagcccaattccattattcttttagctgctaaaagcgacgtcttgtattttgataattataccaaggataaaatatcttacgactctccatacgatgatctagttacaactatcacaattaaatcattgactgctagagatgccggtacttatgtatgtgcattctttatgacatcgcctacaaatgacactgataaagtagattatgaagaatactccacagagttgattgtaaatacagatagtgaatcgactatagacataatactatctggatctacacattcaccggaaactagttctgagaaacctgattatatagataattctaattgctcgtcggtattcgaaatcgcgactccggaaccaattactgataatgtagaagatcatacagacaccgtcacatacactagtgatagcattaatacagtaagtgcatcatctggagaatccacaacagacgagactccggaaccaattactgataaagaagatcatacagtcacagacactgtctcatacactacagtaagtacatcatctggaattgtcactactaaatcaaccaccgatgatacgtacaatgataatgatacagtaccaccaactactgtaggcggtagtacaacctctattagcaattataaaaccaaggactttgtagaaatatttggtattaccgcattaattatattgtcggccgtggcaatattctgtattacgtattatatatgtaataaacgttcacgtaaatacaaaacagagaacaaagtctagatttttgacttacataaatgtctgggatagtaaaatctatcatattgagcgggccatctggtttaggaaagacagccatagccaaaagactatgggaatatatttggatttgtggtgtcccataccactagatttcctcgtcctatggaacgagaaggtgtcgattaccattacgttaacagagaggccatctggaagggaatagccgccggaaactttctagaacatactgagtttttaggaaatatttacggaacttctaaaactgctgtgaatacagcggctattaataatcgtatttgtgtgatggatctaaacatcgatggcgttagaagtcttaaaaatacgtacctaatgccttactcggtgtatataagacctacctctcttaaaatggttgagaccaagcttcgttgtagaaacactgaagcggatgatgagattcatcgtcgtgtgatgttggcaaaaactgacatggatgaggcaggtgaagccggtctattcgacactattatcattgaagatgatgtgaatttagcatatagtaagttaattcagatactacaggaccgtattagaatgtattttaacactaattagagacttaagacttaaaacttgataattaataatataactcgtttttatatgtggctatttcaacgtctaatgtattagttaaatattaaaacttaccacgtaaaacttaaaatttaaaatgatatttcattgacagatagatcacacattatgaactttcaaggacttgtgttaactgacaattgcaaaaatcaatgggtcgttggaccattaataggaaaaggtggatttggtagtatttatactactaatgacaataattatgtagtaaaaatagagcccaaagctaacggatcattatttaccgaacaggcattttatactagagtacttaaaccatccgttatcgaagaatggaaaaaatctcacaatataaagcacgtaggtcttatcacgtgcaaggcatttggtctatacaaatccattaatgtggaatatcgattcttggtaattaatagattaggtgcagatctagatgcggtgatcagagccaataataatagactaccaaaaaggtcggtgatgttgatcggaatcgaaatcttaaataccatacaatttatgcacgagcaaggatattctcacggagatattaaagcgagtaatatagtcttggatcaaatagataagaataaattatatctagtggattacggattggtttctaaattcatgtctaatggcgaacatgttccatttataagaaatccaaataaaatggataacggtactctagaatttacacctatagattcgcataaaggatacgttgtatctagacgtggagatctagaaacacttggatattgtatgattagatggttgggaggtatcttgccatggactaagatatctgaaacaaagaattgtgcattagtaagtgccacaaaacagaaatatgttaataatactgcgactttgttaatgaccagtttgcaatatgaacctagagaattgctgcaatatattaccatggtaaactctttgacatattttgaggaacccaattacgacaagtttcggcacatattaatgcagggtgtatattattaagtgtggtgtttggtcgataaaaattaaaaaataacttaatttattattgatctcgtgtgtacaaccgaaatcatggcgatgttttacgcacacgctctcggtgggtacgacgagaatcttcatgcctttcctggaatatcatcgactgttgccaatgatgtcaggaaatattctgttgtgtcagtttataataacaagtatgacattgtaaaagacaaatatatgtggtgttacagtcaggtgaacaagagatatattggagcactgctgcctatgtttgagtgcaatgaatatctacaaattggaaatccgatccatgatcaagaaggaaatcaaatctctatcatcacatatcgccacaaaaactactatgctctaagcggaatcgggtacgagagtctagacttgtgtttggaaggagtagggattcatcatcacgtacttgaaacaggaaacgctgtatatggaaaagttcaacatgattattctactatcaaagagaaggccaaagaaatgagtgcacttagtccaggacctatcatcgattaccacgtctggataggagattgtatctgtcaagttactgctgtggacgtacatggaaaggaaattatgaaaatgagattcaaaaagggtgcggtgcttccgatcccaaatctggtaaaagttaaacttggggagaatgatacagaaaatctttcttctactatatcggcgacaccatcgaggtaaccacctctctggaagacagcgtgaataatgtactcatgaaacgtttggaaactatacgccatatgtggtctgttgtatatgatcattttgatattgtgaatggtaaagaatgctgttatgtgcatacgcatttgtctaatcaaaatcttataccgagtactgtaaaaacaaatttgtacatgaagactatgggatcatgcattcaaatggattccatggaagctctagagtatcttagcgaactgaaggaatcaggtggatggagtcccagaccagaaatgcaggaatttgaatatccagatggagtggaagacactgaatcaattgagagattggtagaggagttcttcaatagatcagaacttcaggctggtgaatcagtcaaatttggtaattctattaatgttaaacatacatctgtttcagctaagcaactaagaacacgtatacggcagcagcttccttctatactctcatcttttaccaacacaaagggtggatatttgttcattggagttgataataatacacacaaagtatttggattcacggtgggttacgactacctcagactgatagagaatgatatagaaaagcatatcaaaagactttgtgttgtgtatttctgtgagaagaaagaggacatcaagtacgcgtgtcgattcatcaaggtatataaacctggggatgaggctacctcgacatacgtgtgcgctatcaaagtggaaagatgctgttgtgctgtgtttgcagattggccagaatcatggtatatggatactaatggtatcaagaagtattctccagatgaatgggtgtcacatataaaattttaattaatgtaactatagagaacaaataataaggttgtaatatcatatagacaataactaacaattaattagtaactgttatctcttttttaattaaccaactaactatatacctattaatacatcgtaattatagttcttaacatctattaatcattaattcgcttctttaattttttataaactaacattgttaattgaaaagggataacatgttacagaatataaattatatatggatttttttaaaaaggaaatacttgactggagtatatatttatctcttcattatatagcacgcgtgttttccaatttttccacatcccatataatacaggattataatctcgttcgaacatacgagaaagtggataaaacaatagttgattttttatctaggttgccaaatttattccatattttagaatatggggaaaatattctacatatttattctatggatgatgctaatacgaatattataattttttttctagatagagtattaaatattaataagaacgggtcatttatacacaatctcgggttatcatcatccattaatataaaagaatatgtatatcaattagttaataatgatcatccagataataggataagactaatgcttgaaaatggacgtagaacaagacattttttgtcctatatatcagatacagttaatatctatatatgtattttaataaatcatggattttatatagatgccgaagacagttacggttgtacattattacatagatgtatatatcactataagaaatcagaatcagaatcatacaatgaattaattaagatattgttaaataatggatcagatgtagataaaaaagatacgtacggaaacacaccttttatcctattatgtaaacacgatatcaacaacgtggaattgtttgagatatgtttagagaatgctaatatagactctgtagactttaatagatatacacctcttcattatgtctcatgtcgtaataaatatgattttgtaaagttattaatttctaaaggagcaaatgttaatgcgcgtaataaattcggaactactccattttattgtggaattatacacggtatctcgcttataaaactatatttggaatcagacacagagttagaaatagataatgaacatatagttcgtcatttaataatttttgatgctgttgaatctttagattatctattatccagaggagttattgatattaactatcgtactatatacaacgaaacatctatttacgacgctgtcagttataatgcgtataatacgttggtctatctattaaacaaaaatggtgattttgagacgattactactagtggatgtacatgtatttcggaagcagtcgcaaacaacaacaaaataataatggaagtactattgtctaaacgaccatctttgaaaattatgatacagtctatgatagcaattactaaacataaacagcataatgcagatttattgaaaatgtgtataaaatatactgcgtgtatgaccgattatgatactcttatagatgtacagtcgctacagcaatataaatggtatattttaagatgtttcgatgaaatagatatcatgaagagatgttatataaaaaataaaactgtattccaattagttttttgtatcaaagacattaatactttaatgagatacggtaaacatccttctttcgtgaaatgcactagtctcgacgtatacggaagtcgtgtacgtaatatcatagcatctattagatatcgtcagagattaattagtctattatccaagaagctggatcctggagataaatggtcgtgttttcctaacgaaataaaatataaaatattggaaaactttaacgataacgaactatccacatatctaaaaatcttataaacattattaaaatataaaatctaagtaggataaaatcacactacatcattgtttccttttagtgctcgacagtgtatactatttttaacgctcataaataaaaatgaaaacgatttccgttgttacgttgttatgcgtactacctgctgttgtttattcaacatgtactgtacccactatgaataacgctaaattaacgtctaccgaaacatcgtttaatgataaccagaaagttacgtttacatgtgatcagggatatcattctttggatccaaatgctgtctgtgaaacagataaatggaaatacgaaaatccatgcaaaaaaatgtgcacagtttctgattatgtctctgaactatataataaaccgctatacgaagtgaattccaccatgacactaagttgcaacggcgaaacaaaatattttcgttgcgaagaaaaaaatggaaatacttcttggaatgatactgttacgtgtcctaatgcggaatgtcaacctcttcaattagaacacggatcgtgtcaaccagttaaagaaaaatactcatttggggaatatatgactatcaactgtgatgttggatatgaggttattggtgcttcgtacataagttgtacagctaattcttggaatgttattccatcatgtcaacaaaaatgtgatatgccgtctctatctaacggattaatttccggatctacattttctatcggtggcgttatacatcttagttgtaaaagtggttttacactaacggggtctccatcatccacatgtatcgacggtaaatggaatcccatactcccaatatgtgtacgaactaacgaaaaatttgatccagtggatgatggtcccgacgatgagacagatttgagcaaactctcgaaagacgttgtacaatatgaacaagaaatagaatcgttagaagcaacttatcatataatcatagtggcgttgacaattatgggcgtcatatttttaatctccgttatagtattagtttgttcctgtgacaaaaataatgaccaatataagttccataaattgctaccgtaaatataaatccgttaaaataattaataatttaataacaaacaagtatcaaaagattaaagacttatagctagaatcaattgagatgtcttcttcagtggatgttgatatctacgatgccgttagagcatttttactcaggcactattataacaagagatttattgtgtatggaagaagtaacgccatattacataatatatacaggctatttacaagatgcgccgttataccgttcgatgatatagtacgtactatgccaaatgaatcacgtgttaaacaatgggtgatggatacacttaatggtataatgatgaatgaacgcgatgtttctgtaagcgttggcaccggaatactattcatggaaatgtttttcgattacaataaaaatagtatcaacaatcaactaatgtatgatataattaatagcgtatctataattctagctaatgagagatatagaagcgcttttaacgacgatggtatatacatccgtagaaatatgattaacaagttgtacggatacgcatctctaactactattggcacgatcgctggaggtgtttgttattatctgttgatgcatctagttagtttgtataaataattatttcaatatactagttaaaattttaagattttaaatgtataaaaaactaataacgtttttatttgtaataggtgcagtagcatcctattcgaataatgagtacactccgtttaataaactgagtgtaaaactctatatagatggagtagataatatagaaaattcatatactgatgataataatgaattggtgttaaattttaaagagtacacaatttctattattacagagtcatgcgacgtcggatttgattccatagatatagatgttataaacgactataaaattattgatatgtataccattgactcgtctactattcaacgcagaggtcacacgtgtagaatatctaccaaattatcatgccattatgataagtacccttatattcacaaatatgatggtgatgagcgacaatattctattactgcagagggaaaatgctataaaggaataaaatatgaaataagtatgatcaacgatgatactctattgagaaaacatactcttaaaattggatctacttatatatttgatcgtcatggacatagtaatacatattattcaaaatatgatttttaaaaatttaaaatatattatcacttcagtgacagtagtcaaataacaaacaacaccatgagatatattataattctcgcagttttgttcattaatagtatacatgctaaaataactagttataagtttgaatccgtcaattttgattccaaaattgaatggactggggatggtctatacaatatatcccttaaaaattatggcatcaagacgtggcaaacaatgtatacaaatgtaccagaaggaacatacgacatatccgcatttccaaagaatgatttcgtatctttctgggttaaatttgaacaaggcgattataaagtggaagagtattgtacgggactatgcgtcgaagtaaaaattggaccaccgactgtaacattgactgaatacgacgaccatatcaatttgtacatcgagcatccgtatgctactagaggtagcaaaaagattcctatttacaaacgcggtgacatgtgtgatatctacttgttgtatacggctaacttcacattcggaaattctaaagaaccagtaccatatgatatcgatgactacgattgcacgtctacaggttgcagcatagactttgccacaacagaaaaagtgtgcgtgacagcacagggagccacagaagggtttctcgaaaaaattactccatggagttcgaaagtatgtctgacacctaaaaagagtgtatatacatgcgcaattagatccaaagaagatgttcccaatttcaaggacaaaatggccagagttatcaagagaaaatttaatacacagtctcaatcttatttaactaaatttctcggtagcacatcaaatgatgttaccacttttcttagcatgcttaacttgactaaatattcataactaatttttattaatgaaataaaactgcatattatacactggttaacgcccttataggctctaaccattttcaagatgaggtccctgattatagtccttctgttcccctccatgtctattagacgatgtgagaagactgaagaggaaacatggggattgaaaatagggttgtgtataattgccaaagatttttatcccgaaagaactgattgcagtgttcatctcccaactgcaagtgaaggattcagggatatacgaaacaccgataaattataaaaaaagcaatgtgtccgctgtttccgttaataatactattttcgtaactggcggattattcataaataactctaatagcacgatcgtggacatttataaagacaaacaatggtcgattatagaaatgcctatggctagggtatatcacggcatcgactcgacatttggaatgttatattttgccggaggtctatccgttaccgaacaatatggtaatttagagaaaaacaacgagatatcttgttacaatcctagaacgaataagtggtttgatatttcatatactatttataagatatccatatcatcattgtgtaaactaaataacgtcttctatgtatttagtaaggacattggatatgtggaaaagtatgatggtgcatggaagttagtacatgatcgtctccccgctataaaggcattatcaacttctccttattgattgaaaatataaatagtttttatgtatagcagtattaccctatagttttattgcttactactaacatggatacagatacagatacagatacagatacagatacagatacagatgttacaaatgtagaagatatcataaatgaaatagatagagagaaagaagaaatactaaaaaatgtagaaattgaaaataataaaaacattaacaagaatcatcccaatgaatatattagagaagcactcgttattaataccagtagtaatagtgattccattgataaagaagttatagaatgtatcagtcacgatgtaggaatatagatcatatctactaatttttataatcgatacaaaacataaaaaacaactcgttattacatagcaggcatggaatccttcaagtattgttttgataacgatggcaagaaatggattatcggaaatactttatattctggtaattcaatactatataaggtcagaaaaaatttcactagttcgttctacaattacgtaatgaagatagatcacaaatcacacaagccattgttgtctgaaatacgattctatatatctgtattggatcctttgactatcgacaactggacacgggaacgtggtataaagtatttggctattccagatctgtatggaattggagaaaccgatgattatatgttcttcgttataaagaattcgggaagagtattcgccccaaaggatactgaatcagtcttcgaagcatgcgtcactatgataaacacgttagagtttatacactctcaaggatttacccatggaaaaatagaaccgaggaatatactgattagaaataaacgtctttcactaattgactattctagaactaacaaactatacaagagtggaaactcacatatagattacaacgaggacatgataacttcaggaaatatcaattatatgtgtgtagacaatcatcttggagcaacagtttcaagacgaggagatttagaaatgttgggatattgcatgatagaatggttcggtggcaaacttccatggaaaaacgaaagtagtataaaagtaataaaacaaaaaaaagaatataaaaaatttatagctactttctttgaggactgttttcctgaaggaaatgaacctctggaattagttagatatatagaattagtatacacgttagattattctcaaactcctaattatgacagactacgtaaactgtttatacaagattgaaattatattcttttttttatagagtgtggtagtgttacggatatttaatattagactatctctatcgcgctacacgaccaatatcgattactatggatatcttctatgaaaggagagaatgtattcatttctccagcgtcaatctcgtcagtattgacaatactgtattatggagctaatggatccactgctgaacagctatcgaaatatgtagaaaaggaggagaacacggataaggttagcgctcagaatatctcattcaaatccatgaataaagtatatgggcgatattctgccgtgtttaaagatttctttttgggaaaaattggcgataagtttcaaactgttgacttcactgattgtcgcactatagatgcaatcaacaagtgtgtagatatctttactgaggggaaaatcaatccactattggatgaaccattgtctcctagcaattagtgccgtatactttaaagcaaaatggttgacgccattcgaaaaggaatttaccagtgattatcccttttacgtatctccgacggaaatggtagacgtaagtatgatgtctatgtacggcgagctatttaatcacgcatctgtaaaagaatcattcggcaacttttcaatcatagaactgccatatgttggagatactagtatgatggtcattcttccagacaagattgatggattagaatccatagaacaaaatctaacagatacaaattttaagaaatggtgtgactctctggaagctacgtttatcgatgttcacattcccaagtttaaggtaacaggctcgtataatctggtggatactctagtaaagtcaggactgacagaggtgttcggttcaactggagattatagcaatatgtgtaatttagatgtgagtgtcgacgctatgatccacaaaacgtatatagatgtcaatgaagagtatacagaagcagctgcagcaacttctgtactagtggcagactgtgcatcaacaattacaaatgagttctgtgtagatcatccgttcatctatgtgattaggcatgttgatggcaaaattcttttcgttggtagatattgctctccgacaactaattgttaaccattttttttaaaaaaaatagaaaaaacatgtggtattagtgcaggtcgttgttcttccaattgcaattggtaagatgacggccaactttagtacccacgtcttttcaccacagcactgtggatgtgacagactgaccagtattgatgacgtcaaacaatgtttgactgaatatatttattggtcgtcctatgcataccgcaacaggcaatgcgctggacaattgtattccacactcctctcttttagagatgatgcggaattagtgttcatcgacattcgcgagctggtaaaaaatatgccgtgggatgatgtcaaagattgtacagaaatcatccgttgttatataccggatgagcaaaaaaccatcagagagatttcggccatcatcggactttgtgcatatgctgctacttactggggaggtgaagaccatcccactagtaacagtctgaacgcattgtttgtgatgcttgagatgctaaattacgtggattataacatcatattccggcgtatgaattgatgagttgtacatcttgacattttctttcttctcttctccctttcttctcttctccctttcttctcttctcccttcctccctcttctccctttcccagaaacaaacttttttacccactataaaataaaatgagtatactacctgttatatttctttctatatttttttattcttcattcgttcagacttttaacgcgcctgaatgtatcgacaaagggcaatattttgcatcattcatggagttagaaaacgagccagtaatcttaccatgtcctcaaataaatacgctatcatccggatataatatattagatattttatgggaaaaacgaggagcggataatgatagaattataccgatagataatggtagcaatatgctaattctgaacccgacacaatcagactctggtatttatatatgcattaccacgaacgaaacctactgtgacatgatgtcgttaaatttgacaatcgtgtctgtctcagaatcaaatatagatcttatctcgtatccacaaatagtaaatgagagatctactggcgaaatggtatgtcccaatattaatgcatttattgctagtaacgtaaacgcagatattatatggagcggacatcgacgccttagaaataagagacttaaacaacggacacctggaattattaccatagaagatgttagaaaaaatgatgctggttattatacatgtgttttagaatatatatacagaggtaaaacatataacgtaaccagaattgtaaaattagaggtacgggataaaataataccttctattatgcaattaccagatggcattgtaacttcaataggtagtaatttgactattgcgtgtagagtatcgttgagacctcccacaacggatgcagacgtcttttggataagtaatggtatgtattacgaagaagatgatggggacggaaacggtagaataagtgtagcaaataaaatctatatgaccgataagagacgtgttattacatcccggttaaacattaatcctgtcaaggaagaagatgctacaacgtttacgtgtatggcgtttactattcctagcatcagcaaaacagttactgttagtataacgtgaatgtatgttgttacatttccatgtcaattgagtttataagaatttttatacattatcttccaacaaacaattgacgaacgtattgctatgattaactcccacgatactatgcatattattaatcattaacttgcaaactatacctagtgctattttgacatactcatgttcttgtgtaattgcggtatctatattattaaagtacgtaaatctagctatagttttattatttaattttagataatataccgtctccttatttttaaaaattgccacatcctttattaaatcatgaatgggaatttctatgtcatcgttagtatattgtgaacaacaagagcagatatctataggaaagggtggaatgcgatacattgatctatgtagttttaaaacacacgcgaactttgaagaatttatataaatcattccatcgatacatccttctatgttgagatgtatatatccaggaattcgtttattaatatcgggaaatgtataaactaaaacattgcccgaaagcggtgcctctatctgcgttatatccgttcttaacttacaaaatgtaaccaatacctttgcatgacttgttttgttcggcaacgttagtttaaacttgacgaatggattaattacaatagcatgatccgcgcatctattaagtttttttactttaacgcccttgtatgtttttacagagactttatctaaatttctagtgcttgtatgtgttataaatataacgggatatagaaccgaatcacctaccttagatacccaattacattttatcagatccagataataaacaaattttgtcgccctaactaattctatattgttatatattttacaattggttatgatatcatgtaataacttggagtctaacgcgcatcgtcgtacgtttatacaattgtgatttagtgtagtatatctacacatgtatttttccgcactatagtattctggactagtgataaaactatcgttatatctgtcttcaatgaactcatcgagatattgctctctgtcatattcatacacctgcataaactttctagacatcttacaatccgtgttattttaggatcatatttacatatttacgggtatatcaaagatgttagattagttaatgggaatcgtctataataatgaatattaaacaattatatgaggacttttaccacaaagcatcataaaaatgagtcgtcgtctgatttatgttttaaatatcaaccgcgaatcaactcataaaatacaagagaatgaaatatatacatattttagtcattgcaatatagaccatacttctacagaacttgattttgtagttaaaaactatgatctaaacagacgacaacctgtaactgggtatactgcactacactgctatttgtataataattactttacaaacgatgtactgaagatattattaaatcatggagtggatgtaacgatgaaaaccagtagcggacgtatgcctgtttatatattgcttactagatgttgcaatatttcacatgatgtagtgatagatatgatagacaaagataaaaaccacttatcgcatagagactattccaacctactactagagtatataaaatctcgttacatgttattgaaggaagaggatatcgatgagaacatagtatccactttattagataagggaatcgatcctaactttaaacaagacggatatacagcgttacattattattatttgtgtctcgcacacgtttataaaccaggtgagtgtagaaaaccgataacgataaaaaaggccaagcgaattatttctttgtttatacaacatggagctaatctaaacgcgttagataattgtggtaatacaccattccatttgtatcttagtattgaaatgtgtaataatattcatatgactaaaatgctgttgacttttaatccgaatttcgaaatatgtaataatcatggattaacgcctatactatgttatataacttccgactacatacaacacgatattcttgttatgttaatacatcactatgaaacaaatgttggagaaatgccgatagatgagcgtcgtatgatcgtattcgagtttatcaaaacatattctacacgtccggcagattcgataacttatttgatgaataggtttaaaaatataaatatttatacccgctatgaaggaaagacattattacacgtagcatgtgaatataataatacacaagtaatagattatcttatacgtatcaacggagatataaatgcgttaaccgacaataacaaacacgctacacaactcattatagataacaaagaaaattccccatataccattaattgtttactgtatatacttagatatattgtagataagaatgtgataagatcgttggtggatcaacttccatctctacctatctttcgtcgcttatcatactagtcatatcctaaatgttgatcatattccaccaaatgattgtgaaagagattgagattaaatcgtctaacaaacaattagtttttatgacattaacatataataaataaattaatcattattgacttaacgatgacgaaagttatcatcatcttaggattcttgattattaatacaaattcattgtctatgaaatgtgaacaaggtgtctcatattataattcacaagaattaaagtgttgtaaactatgtaagccaggaacatattcagatcatcgatgtgataaatacagcgataccatttgtggacattgtccgagtgacacattcacgtcaatatataatcgttctccttggtgtcatagttgtagaggtccatgtggtactaatcgagtagaggtcacaccttgtacacctaccacaaatagaatctgtcattgtgactcgaatagttattgtctccttaaagcttctgatggtaactgtgttacatgtgctcctaaaacaaaatgtggtcgtgggtatggaaagaaaggagaagatgaaatgggtaataccatttgtaagaaatgtcggaagggtacttattcagatattgtatctgactctgatcaatgtaaaccaatgacaagataagacttactcgcatctactggatagacataaaatatcctcctcgtaataatgaaatataatatacactaattattaatatcaataacaatcgagtattaatatataggtcatttttaaatcccttttgggttccgtcccaaacggcgtttcggtctgcgtcgccgccatggccatgccgagcctctccgcgtgctcctccatcgaggacgacttcaactatggcagctcggtggcgtctgccagcgtgcacatacgaatggcatttctaagaaaagtctacggtatcctttgtctacaatttcttttaacaacggcaacaactgcagtatttttatactttgactgcatgcggacatttatacaagggagtcctgttctaatattggcatcaatgttcggatctataggcttgattttcgcattgactttacacagacataaacatcccctgaatctgtacctgctttgtggatttacactgtcggaatctctaacgctggcctctgttgttactttctatgatgtgcatgtcgttatgcaagctttcatgctgactactgcagcgtttcttgctctgactacatatactctacaatcaaagagagatttcagtaaacttggagcaggattgtttgctgctttgtggattttaattttgtcaggactcttggggatatttgtgcaaaatgagacagtggagctggtcctgtctgcttttggggcccttgtattctgtggattcattatctatgacacgcactcactaatacataagctctcgcctgaagagtatgtgttagcctctatcaatctctacttggatatcatcaatctgttcttgcatctgttgcagcttttggaagtatctaataagaaataaagtttaaaatagaattaataaaaacatataggtcattttttaaacatggattggaaaccaaggtagttagttaatacacacaagatatatttttttcacatcatccacccatgggtaacaccaaggttgttagttaataatatacaagatattttttctcactctgatccatgtaaaccaaggacgagataagacactctcattcctcatccacaacccattaaaaaaatggaaattaaagccctctattagcataaacggctacaggtctacctttacaatggcctttccttgtgcccagttcagaccctgtcattgccacgctactaaggactccctgaataccgtggccgacgtcagacattgtctgactgaatacatcctgtgggtttctcatagatggacccatagagaaagcgcagggtctctctacaggcttctcatctctttcagaactgatgcaacggagctctttggtggtgagttgaaggattcacttccgtgggacaattgcgtggagatcattaaatgtttcatcagaaatgactccatgaaaaccgccgaagaacttcgtgcaatcattggactttgtactcaatcagctatcgtctctggaagagtcttcaacgataagtatatcgacatactacttatgctgcgaaagattctgaacgagaacgactatctcaccctcttggatcatatccgcactgctaaatactaaatctccttcatgctctctcactacactttttatcatcttatgaggaatgattgccttcgtgaaataggaataattagcaccagaatagctatggattattgtggtagagagtgcactattctatgtcgtctactggatgaagatgtgacgtacaaaaaaataaaaccagagattgaaacgtgtcacaacttatcaaaacatatagatagacgaggaaacaatgcgctacattgttacgtcttcaataaatgcgatacagacattaagattgttcggctgttactctctcgcggagtcgagagactttgtagaaacaacgaaggattaactccgctaggagcatacagtaagcatagatacgtaaaatctcagattgtgcatctactgatatccagctattcaaattcctctaacgaactcaagtcgaatataaatgatttcgatctgtattcggataatatcgacttacgtctgctaaaatacctaattgtggataaacggatacgtccgtccaagaatacgaattatgcaatcaatggtctcggattggtggatatatacgtaacgacgcctaatccgagaccagaagtattgctatggcttcttaaatcagaatgttacagcaccggttacgtatttcgtacctgtatgtacgacagtgatatgtgtaagaactctcttcattactatatatcgtctcatagagaatctcaatctctatccaaggatgtaattaaatgtttgatcgataacaatgtttccatccatggcagagacgaaggaggatctttacccatccaatactactggtctttctcaaccatagatatagagattgttaaattattattaataaaggatgtggacacgtgtagagtatacgacgtcagccctatattagaggcgtattatctaaacaagcgatttagagtaaccccatataatgtagacatggaaatcgttaatcttcttattgagagacgtcatactcttgtcgacgtaatgcgtagtattacttcgtacgattccagagaatataaccactacatcatcgataacattctaaagagatttagacaacaggatgtacaagccatgttgataaactacttacattacggcgatatggtcgttcgatgcatgttagataacggacaacaactatcctctgcacgactactttgttaataataatctcgtcgatgtaaacgtcgtaaggtttatcgtggaaaatatggacacgcggctgtaaatcacgtatcgaacaatggccgtctatgtatgtacggtctgatattatcgagatttaataattgcgggtatcactgttatgaaaccatactgatagatgtatttgatatactaagcaagtacatggatgatatagatatgatcgataactctactatattacgcggtcgatgtcaataatatacaatttgcaaagcggttattggaatatggagcgagtgtcacgctcgataatcaatacggccatccagaaaagcagttaccaaagagaaaacaaaacgaagctagttgatttattactgagttaccatcccactctagagactatgattgacgcatttaatagagatatacgctatctatatcctgaaccattattcgcctgtatcagatacgccttaatcctagatgatgattttccttctaaagtaaagtatgatatcgccggtcgtcataaggaactaaagcgctatagagtagacattaatagaatgaagaatgtctacatatcaggcgtctccatgtttgatatattatttaaacgaagcaaacgccacaaattgagatacgcaaagaatccgacatcaaatggtacaaaaaagaactaacgtccatcattacagaaactgtaaagaacaatgagaggatcgactccatagtggacaacattaatacagacgataacttgatttcgaaattacccatggagatactttattactccattaaataatttatcatggagcgataatgtcctgtttcatttgtttccatgacatattacaaaatcgattccgtccaagatgataaaaacatttaccggcatcataaacacggagtttattttatatgtctcgcataaacattactaaaaaaatatattgttcggttttctttcacatctttaattatgaaaaagtaaatcattatgagatggacgagattgtacgcatcgttcgcgacagtatgtggtacatacctaacgtatttatggacgacggtaagaatgaaggtcacgtttctgtcaacaatgtctgtcatatgtattttacgttctttgatgtggatacatcgtctcatctgtttaagctagttattaaacactgcgatctgaataaacgaggtaactctccattacattgctatacgatgaatacacgatttaatccatctgtattaaagatattgttacaccacggcatgcgtaactttgatagcaaggatgaccactatcaatcgataacaagatctttgatatactaacggacaccattgatgactttagtaaatcatccgatctattgctgtgttatcttagatataaattcaatgggagcttaaactattacgttctgtacaaaggatccgaccctaattgcgccgacgaggatgaactcacttctcttcattactactgtaaacacatatccacgttctacgaaagcaattattacaagttaagtcacactaagatgcgagccgagaagcgattcatctacgcgataatagattatggagcaaacattaacgcggttacacacttaccttcaacagtataccaaacatagtcctcgtgtggtgtatgctcttttatctcgaggatacgtaataatcttgattgtacacccatcatggaacgattgtgcaacaggtcatattctcataatgttactcaattggcacgaacaaaaggaagaaggacaacatctactttatctattcataaaacataatcaaggatacactctcaatatactacggtatctattagataggttcgacattcagaaagacgaatactataataccgcctttcaaaattgtaacaacaatgttgcctcatacatcggatacgacatcaaccttccgactaaagacggtattcgacttggtgtttgaaaacagaaacatcatatacaaggcggatgttgtgaatgacatcatccaccacagactgaaagtatctctacctatgattaaatcgttgttctacaagatgtctctccctacgacgattactacgtaaaaaagatactagcctactgcctattaagggacgagtcattcgcggaactacatagtaaattctgtttaaacgaggactataaaagtgtatttatgaaaaatatatcattcgataagatagattccatcatcgtgacataagtcgcctcaaagagattcgaatctccgacaccgacctgtatacggtatcacagctatcttaaagccatacattcagacagtcacatttcatttcccatgtacgacgatctcatagaacagtgccatctatcgatggagcgtaaaagtaaactcgtcgacaaagcactcaataaattagagtctaccatcggtcaatctagactatcgtatttgcctccggaaattatgcgcaatatcatctaaacagtatgttgtacggaaagaaccattacaaatattatccatgatagaaagaaaatatctatatgattggagaagtaggaaacaggaacaagacaacgattactacattattaaatcatgaagtccgtattatactcgtatatattgtttctctcatgtataataataaacggaagagatatagcaccgcatgcaccatccgatggaaagtgtaaagacaacgaatacaaacgccataatttgtgtccgggaacatacgcttccagattatgcgatagcaagactaacacacgatgtacgccgtgtggttcgggtaccttcacatctcgcaataatcatttacccgcttgtctaagttgtaacggaagacgcgatcgtgtaacacgactcacaatagaatctgtgaatgctctcccggatattattgtcttctcaaaggatcatccggatgcaaggcatgtgtttcccaaacaaaatgtggaataggatacggagtatccggagacgtcatctgttctccgtgtggtctcggaacatattctcacaccgtctcttccgcagataaatgcgaacccgtacccagaaatacgtttaactatatcgatgtggaaattaacctgtatccagttaacgacacgtcgtgtactcggacgaccactaccggtctcagcgaatccatctcaacgtcggaactaactattactatgaatcataaagactgtaatcccgtatttcgtgatggatacttctccgttcttaataaggtagcgacttcaggtttctttacaggagaaaggtgtgcactctgaatttcgagattaaatgcaataacaaagattcttcctccaaacagttaacgaaagcaaagaatgatactatcatgccgcattcggagacagtaactctagtgggcgacatctatatactatatagtaataccaatactcaagactacgaaactgatacaatctcttatcatgtgggtaatgttctcgatgtcgatagccatatgcccggtagttgcgatatacataaactgatcactaattccaaacccacccactttttatagtaagtttttcacccataaataataaatacaataattaatttctcgtaaaagtagaaaatatattctaatttattgcacggtaaggaagtagaatcataaagaacagtactcaatcaatagcaattatgaaacaatatatcgtcctggcatgcatgtgcctggcggcagctgctatgcctgccagtcttcagcaatcatcctcatcctcctcctcgtgtacggaagaagaaaacaaacatcatatgggaatcgatgttattatcaaagtcacaaagcaagaccaaacaccgaccaatgataagatttgccaatccgtaacggaaattacagagtccgagtcagatccagatcccgaggtggaatcagaagatgattccacatcagtcgaggatgtagatcctcctaccacttattactccatcatcggtggaggtctgagaatgaactttggattcaccaaatgtcctcagattaaatccatctcagaatccgctgatggaaacacagtgaatgctagattgtccagcgtgtccccaggacaaggtaaggactctcccgcgatcactcatgaagaagctcttgctatgatcaaagactgtgaagtgtctatcgacatcagatgtagcgaagaagagaaagacagcgacatcaagacccatccagtactcgggtctaacatctctcataagaaagtgagttacgaagatatcatcggttcaacgatcgtcgatacaaaatgcgtcaagaatctagagtttagcgttcgtatcggagacatgtgcaaggaatcatctgaacttgaggtcaaggatggattcaagtatgtcgacggatcggcatctgaaggtgcaaccgatgatacttcactcatcgattcaacaaaactcaaagcgtgtgtctgaatcgataactctattcatctgaaattggatgagtagggttaatcgaacgattcaggcacaccacgaattaaaaaagtgtaccggacactatattccggtttgcaaaacaaaaatgttcttaactacattcacaaaaagttacctctcgcgacttcttctttttctgtctcaatagtgtgatacgattatgacactattcctattcctattcctatttcctttcagagtatcacaaaaatattaaacctctttctgatggtctcataaaaaaagttttacaaaaatatttttattctctttctctctttgatggtctcataaaaaaagttttacaaaaatatttttattctctttctctctttgatggtctcataaaaaaagttttacaaaaatatttttattctctttctctctttgatggtctcataaaaaaagttttacaaaaatatttttattctctttctctctttgatggtctcataaaaaaagttttacaaaaatatttttattctctttctctctttgatggtctcataaaaaaagttttacaaaaatatttttattctctttctctctttgatggtctcataaaaaaagttttacaaaaatatttttattctctttctctctttgatggtctcataaaaaaagttttacaaaaatatttttattctctttctctctttgatggtctcataaaaaaagttttacaaaaatatttttattctctttctctctttgatggtctcataaaaaaagttttacaaaaatatttttattctctttctctctttgatggtctcataaaaaaagttttacaaaaatatttttattctctttctctctttgatggtctcataaaaaaagttttacaaaaatatttttattctctttctctctttgatggtctcataaaaaaagttttacaaaaatatttttattctctttctctctttgatggtctcataaaaaaagttttacaaaaatatttttattctctttctctctttgatggtctcataaaaaaagttttacaaaaatatttttattctctttctctctttgatggtctcataaaaaaagttttacaaaaatatttttattctctttctctctttgatggtctcataaaaaaagttttacaaaaatatttttattctctttctctctttgatggtctcataaaaaaagttttacaaaaatatttttattctctttctctctttgatggtctcataaaaaagttttacaaaaatatttttattctctttctctctttgat

SEQ ID NO: 12 - DNA, 194711 bp, Vaccinia virus
  Western Reserve (WR)
atttaaaatataatattaatgtactaaaacttatatattattaatttatctaactaaagttagtaaattatatatataattttataattaatttaattttactaattttatttagtgtctagaaaaaaatgtgtgacccatgactgtaggaaactctagagtgtaagaaagatcgatcgctttatagagaccatcagaaagaggtttaatatttttgtgagaccatcgaagagagaaagagataaaacttttttacgactccatcagaaagaggtttaatatttttgtgagaccatcgaagagagaaagagataaaacttttttacgactccatcagaaagaggtttaatatttttgtgagaccatcgaaggagaaagagataaaacttttttacgactccatcagaaagaggtttaatatttttgtgagaccatcgaaggagaaagagataaaacttttttacgactccatcagaaagaggtttaatatttttgtgagaccatcgaagagagaaagagataaaacttttttacgactccatcagaaagaggtttaatatttttgtgagaccatcgaagagagaaagagataaaacttttttacgactccatcagaaagaggtttaatatttttgtgagaccatcgaaggagaaagagataaaacttttttacgactccatcagaaagaggtttaatatttttgtgagaccatcgaagagagaaagagataaaacttttttacgactccatcagaaagaggtttaatatttttgtgagaccatcgaagagagaaagagataaaacttttttacgactccatcagaaagaggtttaatatttttgtgagaccatcgaagagagaaagagataaaacttttttacgactccatcagaaagaggtttaatatttttgtgagaccatcgaagagagaaagagataaaacttttttacgactccatcagaaagaggtttaatatttttgtgagaccatcgaagagagaaagagataaaacttttttacgactccatcagaaagaggtttaatatttttgtgagaccatcgaagagagaaagagaaagagatagttgatctagatatttttcttagtacaaaagtcaatgttttaaaatatatggacaagaatttgtctgtataaaaacttgtgtgaaattttgtaccaaagaaaaaatgtgagcagtatcccctacatggattttactagatcatttatataccaaaaaatattatacgatctacgttttattatatgattttaacgtgtaaattataaacattattttatgatatacaattgtctggtaacctagatgggcataggggatgttgataagctcgacgagtatatgttgttggacgttattgtttaagaaatagttgatgcatcagaaagagaataaaaaatattttagtgagaccatcgaagagagaaagagataaaacttttttacgactccatcagaaagaggtttaatatttttgtgagaccatcgaagagagaaagagataaaacttttttacgactccatcagaaagaggtttaatatttttgtgagaccatcgaagagagaaagagataaaacttttttacgactccatcagaaagaggtttaatatttttgtgagaccatcgaagagagaaagagataaaacttttttacgactccatcagaaagaggtttaatatttttgtgagaccatcgaagagagaaagagataaaacttttttacgactccatcagaaagaggtttaatatttttgtgagaccatcgaagagagaaagagataaaacttttttacgactccatcagaaagaggtttaatatttttgtgagaccatcgaagagagaaagagataaaacttttttacgactccatcagaaagaggtttaatatttttgtgagaccatcgaagagagaaagagataaaacttttttacgactccatcagaaagaggtttaatatttttgtgagaccatcgaagagagaaagagataaaacttttttacgactccatcagaaagaggtttaatatttttgtgagaccatcgaagagagaaagagataaaacttttttacgactccatcagaaagaggtttaatatttttgtgagaccatcgaagagagaaagagataaaacttttttacgactccatcagaaagaggtttaatatttttgtgagaccatcgaagagagaaagagataaaacttttttacgactccatcagaaagaggtttaatatttttgtgagaccatcgaagagagaaagagataaaacttttttacgactccatcagaaagaggtttaatatttttgtgagaccatcgaagagagaaagagataaaacttttttacgactccatcagaaagaggtttaatatttttgtgagaccatcgaagagagaaagagataaaacttttttacgactccatcagaaagaggtttaatatttttgtgagaccatcgaagagagaaagagataaaacttttttacgactccatcagaaagaggtttaatatttttgtgagaccatcgaagagagaaagagataaaacttttttacgactccatcagaaagaggtttaatatttttgtgagaccatcgaagagagaaagagataaaacttttttacgactccatcagaaagaggtttaatatttttgtgagaccatcgaagagagaaagagaataaaaatattttatgactccattgaagagagaaagagaaaatgagaatgagaataaaaatattttagtgacaccatcagaaagaggtttaatatttttgtgagaccatcgaagagagaaagagaataaaaatattttatgactccattgaagagagaaagagaaaatgagaatgagaataaaaatattttagtgacaccatcagaaagaggtttaatattttttatgagaccatcaaagagagaaagagaataaaaatatttttgtaaaactttttttatgagaccatcaaagagagaaagagaataaaaatatttttgtaaaactttttttatgagaccatcaaagagagaaagagaataaaaatatttttgtaaaactttttttatgagaccatcaaagagagaaagagaataaaaatatttttgtaaaactttttttatgagaccatcaaagagagaaagagaataaaaatatttttgtaaaactttttttatgagaccatcaaagagagaaagagaataaaaatatttttgtaaaactttttttatgagaccatcaaagagagaaagagaataaaaatatttttgtaaaactttttttatgagaccatcaaagagagaaagagaataaaaatatttttgtaaaactttttttatgagaccatcagaaagaggtttaatatttttgtgataccctgaaaggaaataggaataggaataggaatagtgtcataatcgtatcacactattgagacagaaaaagaagaagtcgcgagaggtaactttttgtgaatgtagttaagaacatttttgttttgcaaaccggaatatagtgtccggtacacttttttaattcgtggtgtgcctgaatcgttcgattaaccctactcatccaatttcagatgaatagagttatcgattcagacacacgctttgagttttgttgaatcgatgagtgaagtatcatcggttgcaccttcagatgccgatccgtcgacatacttaaatccatccttgacctcaagttcagatgattccttgcacatgtctccgatacgaacgctaaactctagattcttgacacattttgtatcgacgatcgttgaaccgatgatatcttcgtaactcactttcttatgagagatgttagacccgagtactggatgggtcttgatgtcgctgtctttctcttcttcgctacatctgatgtcgatagacacctcacagtctttgatcatagccagagcttcttcatgagtgatcgcgggagagtccttaccttgtcctggggacacgctggacaatctagcattcactgtgtttccatcagcggattctgagatggatttaatctgaggacatttggtgaatccaaagttcattctcagacctccaccgatgatggagtaataagtggtaggaggatctacatcctcgactgatgtggaatcatcttctgattccacctcgggatctggatctgactcggactctgtaatttccgttacggattggcaaatcttatcattggtcggtgtttggtcttgctttgtgactttgataataacatcgattcccatatgatgtttgttttcttcttccgtacacgaggaggaggatgaggatgattgctgaagactggcaggcacatgcatgccaggacgatatattgtttcatgattgctattgattgagtactgttctttatgattctacttccttaccgtgcaataaattagaatatattttctacttttacgagaaattaattattgtatttattatttatgggtgaaaaacttactataaaaagcgggtgggtttggaattagtgatcagtttatgtatatcgcaactaccgggcatatggctatcgacatcgagaacattacccacatgataagagattgtatcagtttcgtagtcttgagtattggtattactatatagtatatagatgtcgacgctagatagacagtctccgaatgcggcatgataccgtcatcattctttgctttcgttaactgtttggaggaaaaatttttgttattgcatttaatctcgaaattcagagtgcacacctttctcctgtaaagaaacctgaagttgctaccttattaaggacggagaagtattcctcacgaaatacgggattacagtctttatgattcatagtaatagttagttccgacgttgagatggattcgctgagaccggtagtggtcgttaactggatacagattaatttccacatcgatatagttaaaggtattactgggtacgggttcgcatttatctgcggaagagacggtgtgagaatatgttccgagaccacacggagaacagatgacgtctccggatactccgtatcctattccacattttgtttgggaaacacatgccttgcatccggatgatcctttgagaagacaataatatccgggagagcattcacagattctattgtgagtcgtgttacacggtcgcgtcttccgttacaacttagacaagcgggtaaatgattattgcgagatgtgaaggtacccgaaccacacggcgtacattgtgtgttagtcttgctatcgcataatctggaagcgtatgttcccggacacaaattatggcgtttgtattcgttgtctttacactttccatcggatggtgcatgcggtgctatatctcttccgtttattattatacatgagagaaacaatatatacgagtataatacggacttcatgatttaataatgtagtaatcgtcgtcttgttcctgtttcctacttctccaatcatatagatattttctttctatcatggataatatttgtaatggttcttttcgtacaacatactgtttagatgatattgcgcataatttccggaggcaaatacgatagtctagattgaccgatggtagactctaatttattgagtgctttgtcgacgagtttacttttacgctccatcgatagatggcactgttctatgagatcgtcgtacatgggaaatgaaatgtgactgtctgaatgtatggctttaagatagctgtgataccgtatacaggtcggtgtcggagattcgaatctctttaaggcgacttatgtcacgatgatggaatctatcttatcgaatgatatatttttcataaatacacttttatagtcctcgtttaaacagaatttactatgtagttccgcgaatgactcgtcccttaataggcagtaggctattatcttctttacgtagtaatcgtcgtagggagagacatcttgtagaacaacgatttaatcataggtagagatactttcagtctgtggtggatgatgtcattcacaacatccgccttgtatatgatgtttctgttttcaaacaccaagtcgaataccgtctttagtcggaaggttgatgtcgtatccgatgtatgaggcaacattgttgttacaattttgaaaggcggtattatagtattcgtctttctgaatgtcgaacctatctagtagataccgtagtatattgagagtgtatccttgattatgttttatgaatagataaagtagatgttgtccttcttccttttgttcgtgccaattgagtaacattatgagaatatgacctgttgcacaatcgttccatgatgggtgtacaatcaagattattacgtatcctcgtatcggctcctcgagataaaagagcatacaccacacgaggactatgtttggtatactgttgaaggtaagtgtgtaaccgcgttaatgtttgctccataatctattatcgcgtagatgaatcgcttctcggctcgcatcttagtgtgacttaacttgtaataattgcttttgtagaacgtggatatgtgtttacagtagtaatgaagagaagtgagttcatcctcgtcggatcctttgtacagaacgtaatagtttaagctcccattgaatttatatctaagataacacagcaatagatcggatgatttactaaagtcatcaatggtgtccgttagtatatcaaagatcttgttatcgattgatagtggtgtcctttttcatccttgctatcaaagttacgcatgccgtggtgtaacaatatctttaatacagatggattaaatcgtgtattcatcgtatagcaatgtaatggagagttacctcgtttattcagatcgcagtgtttaataactagcttaaacagatgagacgatgtatccacatcaaagaacgtgaaatacatatgacagacattgttgacagaaacgtgaccttcattcttaccgtcgtccataaatacgttaggtatgtaccacatactgtcgcgaacgatgcgtacaatctcgtccatctcataatgatttactttttcataattaaagatgtgaaagaaaaacagaacaatatatttttttagtaatgtttatgcgagacatataaaataaactccgtgtttatgatcatttttaacagcaacacattcaatattgtattgttatttttatattatttacacaattaacaatatattattagtttatattactgaattaataatataaaattcccaatcttgtcataaacacacactgagaaacagcataaacacaaaatccatcaaaaatgtcgatgaaatatctgatgttgttgttcgctgctatgataatcagatcattcgccgatagtggtaacgctatcgaaacgacatcgccagaaattacaaacgctacaacagatattccagctatcagattatgcggtccagagggagatggatattgtttacacggtgactgtatccacgctagagatattgacggtatgtattgtagatgctctcatggttatacaggcattagatgtcagcatgtagtattagtagactatcaacgttcagaaaacccaaacactacaacgtcatatatcccatctcccggtattatgcttgtattagtaggcattattattattacgtgttgtctattatctgtttataggttcactcgacgaactaaactacctatacaagatatggttgtgccataatttttataaatttttttatgagtatttttacaaaaaaaatgtataaagtgtatgtcttatgtatatttataaaaatgctaagtatgcgatgtatctatgttatttgtatttatctaaacaatacctctacctctagatattatacaaaaattttttatttcggcatattaaagtaaaatctagttaccttgaaaatgaatacagtgggtggttccgtatcaccagtaagaacataatagtcgaatacagtatccgattgagattttgcatacaatactagtctagaaagaaatttgtaatcatcttctgtgacgggagtccatatatctgtatcatcgtctagtttatcagtgtcccatgctatattcctgttatcatcattagttaatgaaaataactctcgtgcttcagaaaagtcaaatattgtatccatacatacatctccaaaactatcgcttatacgtttatctttaacgatacctatacctagatggttatttactaacagacattttccagatctattgactataactcctatagtttccacatcaaccaagtaatgatcatctattgttatataacaataacataactcttttccatttttatcagtatgtatatctatatcaacgtcgtcgttgtagtgaatagtagtcattgatctattatatgaaacggatatgtctagaacggcaattgttttacgtccagttaacactttctttgatttaaagtctagagtctttgcaaacataatatccttatccgactttatatttcctgtagggtggtataattttattttgcctccacatatcggtgtttccaaatatattactagacaatattccatatagttattagttaagggtacccaattagaacacgtacgcttattatcatcatttggatcgtatttcataaaagttattgtactatcgatgtcaacacattctacattttttaatcgtctatatagtatttttctgatattttctataatatcagaattgtcttccatcggaagttgtatactatcggaatcagttacatgtttaaataattctctgatgtcattccttatacaatcaaattcattattaaacagtttaatagtctgtagacctttatcgtcgtaaatatccattgtcttattagttacgcttatttttatgtgttttacgttgctttattatattttataagaatgattgtttgacgaatcacgagaactattaagacacattattaggtatatattataaaaaagtttttgattacgatgttataagaggaaagaggacacattaacatcatacatcaattaactacattcttataacatcgtaatcaaaagaattgcaattttgatgtataacaactgtcaatgggttatggaattgtatattacatattatacggtatgttggtaacgacaaataccgatcggtaattgtctgccggtgtaatagaattatatatatctatctattacaccggctgagtatgcataataataagttgtggtagtatgatctccatatttataatttaggactttgtattcagtatttttggaatcataaaaaataaaaaaaagttttactaatttaaaatttaaaaagtatttacatttttttcactgtttagtcgcggatatggaattcgatcctgccaaaatcaatacatcatctatagatcatgtaacaatattacaatacatagatgaaccaaatgatataagactaacagtatgcattatccgaaatattaataacattacatattatatcaatatcacaaaaataaatacacatttggctaatcaatttcgggcttggaaaaaacgtatcgccggaagggactatatgactaacttatctagagatacaggaatacaacaatcaaaacttactgaaactatacgtaactgtcaaaaaaatagaaacatatatggtctatatatacactacaatttagttattaatgtggttattgattggataaccgatgtgattgttcaatcaatattaagagggttggtaaattggtacatagctaataatacctatacacccaataatacaacaaccatttctgagttggatatcatcaaaatactggataaatacgaggacgtgtatagagtaagtaaagaaaaagaatgtggaatttgctatgaagttgtttactcaaaacgatagatactttggtttattggattcgtgtactcatatattttgcataacatgcatcaatatatggcataaaacacgaagagaaaccggtgcgtcggataattgtcctatatgtcgtacccgttttagaaacataacaatgagcaagttctataagctagttaactaataaataaaaagtttaatttgttgacgacgtatgtcgttatttttctcgtatgaaagattaaattcaattcaattcgttgtttctaatataatctgccgtattggatggattctcaagacaattgcatttagattatattatcatgaataaaaatagtagcacgcactacttcagccaaatattcttttttgaaacgccatctatcgtagtgaggacacaagtgaacctataattatcaaatttattagtatcagtcacatgaaggactttctgtagagtgacgattctaccatctatggtactaacggtttcatcctccttgataccctcacccaaatgttctataaatttagcatcctcgtccgatctcatatcctttgccaaccaatacatgtagctaaaattaggcataaatttcacacatccagtgcaacgaaattctccagaagatgttacgatgtttaggttaggacatttgatttcgtcggcattaacatatgggtgaacacacccatacatgaaagcgatgagaaataggattctcatcttgccaaaatatcactagaaaaaatttatttatcaattttaaaggtataaaaaatacttattgttgctcgaatattttgtatttgatggtatacggaagattagaaatgtaggtattatcatcaactgattctatggttttatgtattctatcatgtttcactattgcgtcggaaataatatcatatgcttccacatatattttattttgttttaactcataatactcacgtaattctggattattggcatatctatgaataattttagctccatgatcagtaaatattaatgagaacatagtattaccacctaccattatttttttcatttcgttcaattcttgattgcaaagatctatataatcattatagcgttgacttatggactctggaatcttagacgatgtacagtcatctataatcatggcatatttaatacattgttttatagcatagtagttatctacgatgttagatatttctctcaatgaatcaatcacacaatctaatgtaggtttatgacataatagcattttcagcagttcaatgtttctagattcgttgatggcaatggctatacatgtatatccgttatttgatctaatgttgacatctgaaccggattctagcagtaaagatactagagattgtttattatatctaacagccttgtgaagaagtgtttctcctcgtttgtcaatcatgttaatgtctttaagataaggtaggcaaatgtttatagtactaagaattgggcaagcataagacatgtcacaaagaccctttttgtatgtataagtgtaaaaattataacattcatagttggatttacataggtgtccaatcgggatctctccatcatcgagataattgatggcatctcccttccttttttagtagatatttcatcgtgtaagaatcaatattaatatttctaaagtattcgtgtatagcctctttatttaccacagttccatattccactagagggatatcgccgaatgtcatatactcaattagtatatgttggaggacatccgagttcattgttttcaatatcaaaaagatggtttccttatcatttctccatagtggtacaatactacacattattccgtgcggctttccattttccaaaaacaatttgaccaaatctaaatctacatctttattgtatctataatcactatttagataatcagccataattactcgagtgcaacatgttagatcgtctatatatgaataagcagtgttatctattcctttcattaacaatttaacgatgtctatatctatatgagatgacttaatataatattgaagagctgtacaatagtttttatctatagaagacggcttgattccgtgattaattagacatttaacaacttccggacgcacatatgctctcgtatccgactttgaatacagatgagagatgatatacagatgcaatacggtaccgcaatttcgtagttgataatcatcatacgcgtatcagtactcgtcctcataaagaacactgcagccattttctatgaacaaatcaataattttaggaacaggatcattgtcattacataattttctataactgaacgatggttttcacatttaacactcaagtcaaatccatgttctaccaacacctttatcaagtcaacgtctacatttttggatttcatatagctgaatatattaaagtcatttatgttgctaaatccagtggcttctagtagagccatcgctatatcctttaactttaacatgtctactatttgtgtattcttctaatggggtagctgtctccaatttttgcgtaatggattagtgccactgtctagtagtagtttgacgacctcgacattattacaatgctcattaaaaaggtatgcgtgtaaagcattattcttgaattggttcctggtatcattaggatctctgtctctcaacatctgtttaagttcatcgagagccacctcctcattttccagatagtcaaacattttgactgaatgagctactgtgaactctatacacccacacaactaatgtcattaaatattatttttttgaatgtatttataccatgtcaaaaacttgtacaattattaataaaaataatttagtgtttaaattttaccagttccagattttacacctccgttaaccccactttttacaccactggacgatcctcctccccacattccaccgccaccagatgtataagttttagatcctttattactaccatcatgtccatggataaagacactccacatgccgccactactaccccctttagaagacatattaataagacttaaggacaagtttaacaataaaattaatcacgagtaccctactaccaacctacactattatatgattatagtttctatttttacagtaccttaactaaagtctctagtcacaagagcaatactaccaacctacactattatatgattatagtttctatttttataggaacgcgtacgagaaaatcaaatgtctaatttctaacggtagtgttgataaacgattatcgtcaatggatacctcctctatcatgtcgtctattttcttactttgttctattaacttattagcattatatattatttgattataaaacttatattgcttattagcccaatctgtaaatatcggattattaacatatcgtttctttgtaggtttatttaacatgtacatcactgtaagcatgtccgtaccatttattttaatttgacgcatatccgcaatttctttttcgcagtcggttataaattctatatatgatggatacatgctacatgtgtacttataatcgactaatatgaagtacttgatacatattttcagtaacgatttattattaccacctatgaataagtacctgtgatcgtctaggtaatcaactgttttcttaatacattcgatggttggtaatttactcagaataatttccaatatcttaatatataattctgctatttctgggatatatttatctgccagtataacacaaatagtaatacatgtaaacccatattttgttattatattaatgtctgcgccattatctattaaccattctactaggctgacactatgcgacttaatacaatgataaagtatactacatccatgtttatctattttgtttatatcatcaatatacggcttacaaagttttagtatcgataacacatccaactcacgcatagagaaggtagggaataatggcataatatttattaggttatcatcattgtcattatctacaactaagtttccattttttaaaatatactcgacaactttaggatctctattgccaaatttttgaaaatatttatttatatgcttaaatctatataatgtagctccttcatcaatcatacatttaataacattgatgtatactgtatgataagatacatattctaacaatagatcttgtatagaatctgtatatcttttaagaattgtggatattaggatattattacgtaaactattacacaattctaaaatataaaacgtatcacggtcgaataatagttgatcaactatataattatcgattttgtgatttttcttcctaaactgtttacgtaaatagttagatagaatattcattagttcatgaccactatagttactatcgaataacgcgtcaaatatttcccgtttaatatcgcatttgtcaagataataatagagtgtggtatgttcacgataagtataataacgcatctcttttttgtgtgaaattaaatagtttatcacgtccaaagatgtagcataaccatcttgtgacctagtaataatataataatagagaactgttttacccattctatcatcataatcagtggtgtagtcgtaatcgtaatcgtctaattcatcatcccaattataatattcaccagcacgtctaatctgttctattttgatcttgtatccatactgtatgttgctacatgtaggtattcctttatccaataatagtttaaacacatctacattgggatttgatgttgtagcgtatttctctacaatattaataccatttttgatactatttatttctatacctttcgaaattagtaatttcaataagtctatatcgatgttatcagaacatagatattcgaatatatcaaaatcattgatatttttatagtcgactgacgacaataacaaaatcacaacatcgtttttgatattattatttttcttggtaacgtatgcctttaatggagtttcaccatcatactcatataatggatttgcaccactttctatcaatgattgtgcactgctggcatcgatgttaaatgttttacaactatcatagagtatcttatcgttaaccatgattggttgttgatgctatcgcattttttggtttctttcatttcagttatgtatggatttagcacgtttgggaagcatgagctcatatgatttcagtactgtagtgtcagtactattagtttcgatcagatcaatgtctagatctatagaatcaaaacacgataggtcagaagataatgaatatctgtacgcttctttttgtactgtaacttctggttttgttagatggttgcatcgtgctttaacatcaatggtacaaattttatcctcgctttgtgtatcatattcgtctctagtataaaattctatattcagattatcatgcgatgtgtatacgctaacggtatcaataaacggagcacaccatttagtcataacagtaatccaaaattttttaaagtatatcttaacgaaagaagttgtgtcattgtctacggtgtatggtactagatcctcataagtgtatatatctagagtaatgtttaatttattaaatggttgataatatggatcctcatgacaatttccgaagatggaaatgagatatagacatgcaataaatctaatcgaagacatggttactccttaaaaaaatacgaataatcaccttggctatttagtaagtgtcatttaacactatactcatattaatccatggactcataatctctatacgggattaacggatgttctatatacggggatgagtagttttcttctttaactttatactttttactaatcatatttagactgatgtatgggtaatagtgtttaaagagttcgttctcatcatcagaataaatcaatatctctgtttttttgttatacagatgtattacagcctcatatattacgtaatagaacgtgtcatctaccttattaactttcaccgcatagttgtttgcaaatacggttaatcctttgacctcgtcgatttccgaccaatctgggcgtataatgaatctaaactttaatttcttgtaatcattcgaaataatttttagtttgcatccgtagttatcccctttatgtaactgtaaatttctcaacgcgatatctccattaataatgatgtcgaattcgtgctgtatacccatactgaatggatgaactaacgaatatcaacggcgttaatagtaatttactttttcatctttacatattgggtactagttttactatcataagtttataaattccacaagctactatggaataagccaaccatcttagtataccacacatgtcttaaagtttattaattaattacatgttgttttatatatatcgctacgaatttaaagagaaatcagtttaggaagaaaaaaattatctatctacatcatcacgtctctgtattctacgatagagtgctactttaagatgagacatatccgtgtcatcaaaaatatactccattaaaatgattattccggcagcgaacttgatattggatatatcacaacctttgttaatatctacgacaatagacagcagtcccatggttccataaacagtgagtttatctttctttgaagcgatagtttgtagagatcttataaaaccgtcaaacgacatcgcatttatatctttagctaattcatatatgttaccatcgtaatatctaaccgcgtctatcttaaacgtttccatcgctttaaagacgtttccgatagatggtctcatttcatcagtcatactgagccaacaaatataatcgtgtataacatctttgatagaatcagactctaaagaaaacgaatcggctttattatacgcattcatgataaacttaatgaaaaatgtttttcgttgtttaagttggatgaatagtatgtcttaataattgttattatttcattaattaatatttagtaacgagtacactctataaaaacgagaatgacataactagttatcaaagtgtctaggacgcgtaattttcatatggtatagatcctgtaagcattgtctgtattctggagctattttctttatcgcattagtaagttcagaatatgttataaatttaaatcgaataacgaacatgactttagtaaagtcgtctatattaactcttttattttctagccatcgtaataccatgtttaagatagtatattctctagttactacgatctcatcgttgtctagaatatcacatactgaatctacatccaattttagaaattggtctgtgttacatatctcttctatattattgttgatgtattgtcgtagaaaactattacgtagaccattttctttataaaacgaatatatagtactccaattatctttaccgatatatttgcacacataatccattctctcaatcactacatctttaagattttcgttgttaagatatttggctaaactatataattctattagatcatcaacagaatcagtatatatttttctagatccaaagacgaactctttggcgtcctctataatattcccagaaaagatattttcgtgttttagtttatcgagatctgatctgttcatatacgccatgattgtacggtacgttatgataaccgcataaaataaaaatccattttcatttttaaccaatactattcataattgagattgatgtaatactttgttactttgaacgtaaagacagtacacggatccgtatctccaacaagcacgtagtaatcaaatttggtgttgttaaacttcgcaatattcatcaatttagatagaaacttatactcatcatctgttttaggaatccatgtattattaccactttccaacttatcattatcccaggctatgtttcgtccatcatcgttgcgcagagtgaataattcttttgtattcggtagttcaaatatatgatccatgcatagatcggcaaagctattgtagatgtgatttttcctaaatctaatataaaactcgtttactagcaaacactttcctgatttatcgaccaagacacatatggtttctaaatctatcaagtggtggggatccatagttatgacgcagtaacatagattattacattcttgactgtcgctaatatctaaatatttattgttatcgtattggattctgcatatagatggcttgtatgtcaaagatatagaacacataaccaatttatagtcgcgctttacattctcgaatctaaagttaagagatttagaaaacattatatcctcggatgatgttatcactgtttctggagtaggatatattaaagtctttacagatttcgtccgattcaaataaatcactaaataatatcccacattatcatctgttagagtagtatcattaaatctattatattttatgaaagatatatcactgctcacctctatatttcgtacatttttaaactgtttgtataatatctctctgatacaatcagatatatctattgtgtcggtagacgataccgttacatttgaattaatggtgttccattttacaacttttaacaagttgaccaattcatttctaatagtatcaaactctccatgattaaatattttaatagtatccattttatatcactacggacacaaagtagctgacataaaccattgtataatttttatgttttatgtttattagcgtacacattttggaagttccggcttccatgtatttcctggagagcaagtagatgatgaggaaccagatagtttatatccgtacttgcacttaaagtctacattgtcgttgtatgagtatgatcttttaaacccgctagacaagtatccgtttgatattgtaggatgtggacatttaacaatctgacacgtgggtggatcggaccattctcctcctgaacacaggacaccagagttaccaatcaacgaatatccactattgcaactataagttacaacgctcccatcggtataaaaatcctcgtatccgttatgtcttccgttggatatagatggaggggattggcatttaacagattcacaaataggtgcctcgggattccataccatagatccagtagatcctaattcacaatacgatttagattcaccgatcaaatgatatccgctattacaagagtacgttatactagagccaaagtctactccaccaatatcaagttggccattatcgatatctcgaggcgatgggcatctccgtttaatacattgattaaagagtgtccatccagtacctgtacatttagcatatataggtcccattttttgctttctgtatccaggtagacatagatattctatagtgtctcctatgttgtaattagcattagcatcagtctccacactattcttaaatttcatattaatgggtcgtgacggaatagtacagcatgatagaacgcatcctattcccaacaatgtcaggaacgtcacgctctccaccttcatatttatttatccgtaaaaatgttatcctggacatcgtacaaataataaaaagcccatatatgttcgctattgtagaaattgtttttcacagttgctcaaaaacgatggcagtgacttatgagttacgttacactttggagtctcatctttagtaaacatatcataatattcgatattacgagttgacatatcgaacaaattccaagtatttgattttggataatattcgtattttgcatctgctataattaagatataatcaccgcaagaacacacgaacatctttcctacatggttaaagtacatgtataattctatccatttgtcttccttaactatatatttgtatagataattacgagtctcgtgagtaattccagtaattacatagatgtcgccgtcgtactctacagcataaactatactatgatgtctaggcatgggagacttttttatccaacgatttttagtgaaacattccacatcgtttaatactacatatttttcatacgtggtataaactccacccattacatatatatcatcgtttacgaataccgacgcgcctgaatatctaggagtaattaagtttggaagtcttatccatttcgaagtgccgtgtttcaaatattctgccacacccgttgaaatagaaaattctaatcctcctattacatataactttccatcgttaacacaagtactaacttctgattttaacgacgacatattagtaaccgttttccattttttcgtttcaagatctacccgcgatacggaataaacatgtctattgttaatcatgccgccaataatgtatagacaattatgtaaaacatttgcattatagaattgtctatctgtattaccgactatcgtccaatattctgttctaggagagtaatgggttattgtggatatataatcagagtttttaatgactactatattatgttttataccatttcgtgtcactggctttgtagatttggatatagttaatcccaacaatgatatagcattgcgcatagtattagtcataaacttgggatgtaaaatgttgatgatatctacatcgtttggatttttatgtatccactttaataatatcatagctgtaacatcctcatgatttacgttaacgttttcgtgggataagatagttgtcagttcatcctttgataattttccaaattctggatcggatgtcaccgcagtaatattgttgattatttctgacatcgacgcattatatagttttttaattccatatcttttagaaaagttaaacatccttatacaatttgtggaattaatattatgaatcatagtttttacacatagatctactacaggcggaacatcaattattatggcagcaactagtatcatttctacattgtttatggtgatgtttatcttcttccagcgtatatagtctaatagcgattcaaacgcgtgatagtttataccattcaatataatcgcttcatcctttagatggtgatcctgaattcgtttaaaaaaattatacggagatgccgtaataatttccttattcacttgtataatttccccattgatagaaaatatcacgctttccattcttgaagtactataagtaattatagtataatgtaaaggtttatatattcaatattttttataaaaaaatcattttgacattaattcctttttaaatttccgtctatcatctatagaaacgtattctatgaatttataaaatgcttttacgtgtcctatcgtaggcgatagaaccgctaaaaagcctatcgaatttctacaaaagaatctgttatatggtatagggagagtataaaacattaaatgtccgtacttattaaagtattcagtagccaatcctaactctttcgaatacttattaatggctcttgttctgtacgaatctatttttttgaacaacggacctagtggtatatcttgttctatgtatctaaaataatgtctgactagatccgttagtttaatatcctcagtcatcttgtctagaatggcaaatctaactgcgggtttaggctttagtttagtttttatatctacatctatgtctttatctaacaccaaaaatataatagctaatattttattacaatcatccggatattcttctacgatctcactaactaatgtttctttggttatactagtatagtcactatcggacaaataaagaaaatcagatgatcgatgaataatacatttaaattcatcatctgtaagatttttgagatgtctcattaaaatattattagggtcagtactcattatcattcggcagctattacttattttatttttctgtattttattatttttcaccatatagatcaatcattagatcatcaaaatatgtttcaatcatcctaaagagtatggtgaatgactcttcccatctaatttctgaacgttcaccaatgtctctagccactttggcactaatagcgatcattcgcttagcgtcttctatattattaactggttgattcaatctatctagcaatggaccgtcggacagcgtcattctcatgttcttaatcaatgtacatacatcgccgtcatctaccaattcatccaacaacataagctttttaaaatcatcattataataggtttgatcgttgtcatttctccaaagaatatatctaataagtagagtcctcatgcttagtaatttaactattttagttaacaactattttttatgttaaatcaattagtacaccgctatgtttaatacttattcatattttagtttttaggattgagaatcaatacaaaaaattaatgcatcattaattttagaaatacttagtttccacgtagttaatgaaacatttgaactcatcgtacaggacgttctcgtacaggacgtaactataaaccggtttatatttgttcaagatagatacaaatccgataactttttttacgaattctacgggatccactttaaaagtgtcataccgggttctttttattcttttaaacagatcaatggtgtgatgttgattaggtcttttacgaatttgatatagaatagcgttcacatatcctccataatggtcaatcgccatttgttcgtatgtcataaattctttaattatatgacactgtgtattatttagttcatccttgttcatcattaggaatctatccaaaatggcaattatactagaactataggtgcgttgtatacacatattgatgtgtctgtttatacaatccatgatatttggatccatgctactaccttcgggtaaaattgtagcatcatataccatttctagtactttaggttcattattatccattgcagaggacgtcatgatcgaatcctaaaaaaatatattatttttatgttattttgttaaaaataatcatcgaatacttcgtaagatactccttcatgaacataatcagttacaaaacgtttatatgaagtaaagtatctacgatttttacaaaagtccggatgcataagtacaaagtacgcgataaacggaataataatagatttatctagtctatctttttctatagctttcatagttagatacatggtctcagaagtaggattatgtaacatcagcttcgataaaatgactgggttatttagtcttacacattcgctcatacatgtatgaccgttaactacaaagtctacactaaaatgattgaacaatagatagtctaccattgtttcgtattcagatagtacagcgtagtacatagcatcttcacaaattatatcattgtctaatagatatttgacgcatcttatggatcccacttcaacagccatcttaaaatcggtagaatcatattgctttcctttatcattaataatttctaaaacatcatctctatcataaaagatacaaatattaactgtttgatccgtaataacattgctagtcgatagcaatttgttaataagatgcgctgggctcaatgtcttaataagaagtgtaagaggactatctccgaatttgttttgtttattaacatccgttgatggaagtaaaagatctataatgtctacattcttgactgttttagagcatacaatatggagaggtgtatttccatcatgatctggttttgagggactaattcctagtttcatcatccatgagattgtagaagcttttggattgtctgacataagatgtctatgaatatgatttttgccaaatttatccactatcctggcttcgaatccgatggacattatttttttaaacactctttctgaaggatctgtacacgccaacaacggaccacatccttcttcatcaaccgagttgttaatcttggctccatactgtaccaataaatttattctctctatgacttcatcatctgttcccgagagataatatagaggtgttttattatgtttatcacacgcgtttggatctgcgccgtgcgtcagcagcatcgcgactattctattattattaattttagaagctatatgcaatggataatttccatcatcatccgtctcatttggagagtatcctctatgaagaagttcttcgacaaatcgttcatctagtcctttaattccacaatacgcatgtagaatgtgataattatttccagaaggttcgatagcttgtagcatattcctaaatacatctaaatttttactattatatttggcataaagagatagataatactcggccgacataatgttgtccattgtagtataaaaattaatatttctatttctatttctgtatatttgcaacaatttactctctataacaaatatcataacttagttcttttatgtcaagaaggcactggtttagttcatctataaatgtcacgccataactaccacgcatgctatactcagaattatgataaagatatttatccttggggtgtaggtaatggggattaatctttgttggatcagtctctaagttaacacatgtcacacatgatccatttatagttatatcacacgatgatgatttatgaattgattccggaagatcgctatcgtattttgtggttccacaattcatttccatacatgttattgtcacactaatattatgatgaactttatctagccgctgagtggtaaacaacagaacagatagtttattatctttaccaacaccctcagccgctgccacaaatctctgatccgtatccatgatggtcatgtttatttctagtccgtatccagtcaacactatgttagcatttctgtcgatatagctttcactcatatgacactcaccaataatagtagaattaatgtcgtaatttacaccaatagtgagttcggcggcaaagtaccaataccggtaatcttgtcgaggaggacatatagtattcttgtattctaccgaatacccgagagatgcgatacaaaagagtaagactaatttgtaaaccatcttactcaaaatatgtaacaatagtacgatgcaatgagtaagacaataggaaatctatcttatatacacataattattctatcaattttaccaattagttagtgtaatgttaacaaaaatgtgggagaatctaattagtttttctttacacaattgacgtacatgagtctgagttccttgtttttgctaattatttcatccaatttattattcttgactatatcgagatcttttgtataggagtcagacttgtattcaacatgcttttctataatcattttagctatttcggcatcatccaatagtacattttccagattagcagaatagatattaatgtcgtatttgaacagagcctgtaacatctcaatgtctttattatctatagccaatttaatgtccggaatgaagagaagggaattattggtgtttgtcgacgtcatatagtcgagcaagagaatcatcatatccacgtgtccattttttatagtgatgtgaatacaactaaggagaatagccagatcaaaagtagatggtatctctgaaagaaagtaggaaacaatacttacatcattaagcatgacggcatgataaaatgaagttttccatccagttttcccatagaacatcagtctccaatttttcttaacaaacagttttaccgtttgcatgttaccactatcaaccgcataatacaatgcggtgtttcccttgtcatcaaattgtgaatcatccagtccactgaatagcaaaatctttactattttggtatcttccaatgtggctgcctgatgtaatggaaattcattctctagaagatttttcaatgctccagcgttcaacaacgtacatactagacgcacgttattatcagctattgcataatacaaggcactatgtccatggacatccgccttaaatgcatctttgctagagagaaagcttttcagctgcttagacttccaagtattaattcgtgacagatccatgtctgaaacgagacgctaattagtgtatattttttcattttttataattttgtcatattgcaccagaattaataatatctctaatagatctgattagtagatacatggctatcgcaaaacaacatatacacatttaataaaaataatatttattaagaaaattcagatttcacgtacccatcaatataaataaaataatgattccttacaccgtacccatattaaggagattccaccttacccataaacaatataaatccagtaatatcatgtctgatgatgaacacaaatggtgtattaaattccagtttttcaggagatgatctcgccgtagctaccataatagtagatgcctctgctacagttccttgttcgtcgacatctatctttgcattctgaaacattttataaatatataatgggtccctagtcatatgtttaaacgacgcattatctggattaaacatactaggagccatcatttcggctatcgacttaatatccctcttattttcgatagaaaatttagggagtttaagattgtacactttattccctaattgaaacgaccaatagtctaattttgcagccgtaatagaatctgtgaaatgggtcatattatcacctattgccaggtacatactaatattagcatccttatacggaaggcgtaccatatcatattcttcgtcatcgattgtgattgtatttccttgcaatttagtaactacgttcatcatgggaaccgttttcgtaccgtacttattagtaaaactagcattgcgtgttttagtgatatcaaacggatattgccatatacctttaaaatatatagtattaatgattgcccatagagtattattgtcgagcatattagaatctactacattagacataccggatctacgttctactatagaattaattttattaaccgcatctcgtctaaagtttaatctatataggccgaatctatgatattgttgataatacgacggtttaatgcacacagtattatctacgaaactttgataagttagatcagtgtacgtatatttagatgttttcagcttagctaatcctgatattaattctgtaaatgctggacccagatctctttttctcaaatccatagtcttcaataattctattctagtattacctgatgcaggcaatagcgacataaacatagaaaacgaataaccaaacggtgagaagacaatattatcatcttgaatatttttatacgctactataccggcattggtaaatccttgcagacgataggtagacactgaacacgttaacgatagtatcaataacgcaatcatgattttatggtattaataattaaccttatttttatgttcggtataaaaattattgatgtctacacatccttttgtaattgacatctatatatccttttgtataatcaactctaatcactttaacttttacagttttccctaccagtttatccctatattcaacatatctatccatatgcatcttaacactctctgccaagatagcttcaaagtgaggatagtcaaaaagataaatatatagagcataatccttctcgtatactctgccctttattacatcacccgcattgggcaacgaataacaaaatgcaagcatcttgttaacgggctcgtaaattgggataaaaattatgtttttatatctattttattcaagagaatattcaggaatttctttttccggttgtatctcatcgcagtatatatcatttgtacattgtttcatattttttaatagtctacaccttttagtaggactagtatcgtacaattcatagctgtattttgaattccaatcacgcataaaaatatcttccaattgttgacgaagacctaatccatcatccggtgtaatattaatagatgctccacatgtatccgtaaagtaatttcctgtccaatttgaggtacctatatacgccgttttatcggttaccatatatttggcatggtttaccctagaatacggaatgggaggatcagcatctggtacaataaatagctttacttctatatttatgtttttagattttagcatagcgatagatcttaaaaagtttctcatgataaacgaagatcgttgccagcaactaatcaatagcttaactgacacttgtctgtctatagcggctcttcttaattcatcttctatataaggccaaaacaaaatattgcctgccttcgaataaataatagggataaagttcataacagatacataaacgaatttactcgcatttctgatacatgacaataaagcggttaaatcattggttctttccatagtacatagttgttgcggtgcagaagcaataaatacagagtgtggaacgccgcttacgttaatactaagaggatgatctgtattataatacgacggataaaagtttttccaattatatggtagattgttaactccaagataccagtatacctcaaaaatttgagtgagatccgctgccaagttcctattattgaagatcgcaatacccaattctttgacctgagttagtgatctccaatccatgttagcgcttcctaaataaatatgtgtattatcagatatccaaaattttgtatgaagaactcctcctaggatatttgtaatatctatgtatcgtacttcaactccggccatttgtagtctttcaacatcctttaatggtttgttagatttattgacggctactctaactcgtactcctcttttgggtaattgtacaatcttgtttaatattatcgtgccgaaattcgtacccacttcatccgataaactccaataaaaagatgatatatctagtgtttttgtggtattggatagaatttccctccacatgttaaatgtagacaaatatactttatcaaattgcatacctataggaatagtctctgtaatcactgcgattgtattatccggattcattttatttgttaaaagaataatcctatatcacttcactctattaaaaatccaagtttctatttctttcatgactgattttttaacttcatccgtttccttatgaagatgatgtttggcaccttcataaatttttatttctctattacaatttgcatgttgcatgaaataatatgcacctaaaacatcgctaatcttattgtttgttccctggagtatgagagtcggggggtgttaatcttggaaattatttttctaaccttgttggtagccttcaagacctgactagcaaatccagccttaattttttcatgattgattaatgggtcgtattggtatttataaactttatccatatctctagatactgattctggacatagctttccgactggcgcatttagtgtgatggttcccataagtttggcagctagcagattcagttttgaaacagcatctgcattaactagaggagacattagaatcattgctgtaaacaagtttggattatcgtaagaggctagctcccatggaatgacccaataagtagatttaatagttaccacgtgctgtaccaaagtcatcaatcatcattttttcaccattacttcttccatgtccaatatgatcatgtgagaatactaaaattcctaacgatgatatgttttcagctagttcgtcataacgtccagaatgtttaccagctccatgacttatgaatactaatgccttaggatatgtaataggtttccaatatatgtaatcattgtccagattgaacatacagtttgcactcatgattcacgttatataactatcaatattaacagttcgtttgatgatcatattatttttatgttttattgataattgtaaaaacatacaattaaatcaatatagaggaaggagacggctactgtcttttgtgagatagtcatggcgactaaattagattatgaggatgctgttttttactttgtggatgatgataaaatatgtagtcgcgactccatcatcgatctaatagatgaatatattacgtggagaaatcatgttatagtgtttaacaaagatattaccagttgtggaagactgtacaaggaattgatgaagttcgatgatgtcgctatacggtactatggtattgataaaattaatgagattgtcgaagctatgagcgaaggagaccactacatcaattttacaaaagtccatgatcaggaaagtttattcgctaccataggaatatgtgctaaaatcactgaacattggggatacaaaaagatttcagaatctagattccaatcattgggaaacattacagatctgatgaccgacgataatataaacatcttgatactttttctagaaaaaaaattgaattgatgatataggggtcttcataacgcataattattacgttagcattctatatccgtgttaaaaaaaattatcctatcatgtatttgagagttttatatgtagcaaacatgatagctgtgatgccaataagctttagatattcacgcgtgctagtgttagggatggtattatctggtggtgaaatgtccgttatataatctacaaaataatcatcgcatatagtatgcgatagtagagtaaacatttttatcgtttctactgggttcatacatcgtctacccaattcggttataaatgaaattgtcgccaatcttacacccaaccccttgttatccattagtatagtattaacttcgttatttatgtcataaactgtaaatgattttgtagatgccatatcatacatgatattcatgtccctattataatcattactaactttatcacaatatatgttgataatatctatatatgatctagtctttgtgggcaactgtctatacaagtcgtctaaacgttgtttactcatatagtatcgaacagccatcattacatggtcccgttccgttgatagataatcgagtatgttagtggacttgtcaaatctatataccatattttctggaagtggatatacatagtcgtgatcaacattattgctagcctcatcttctatatcctgtactataccattatctatatcatctacataatctacgatattattacacataaacatcgacaacatactattgtttattatctaagtcctgttgatccaaacccttgatctcctctatttgtactatctagagattgtacttcttccagttctggataatatatacgttgatagattagctgagctattctatctccagtatttacattaaacgtacattttccattattaataagaatgactcctatgtttcccctataatcttcgtctattacaccgcctcctatatcaatgccttttagggacagaccagacctaggagctattctaccatagcagaacttaggcatggacatactaatatctgtcttaattaactgtcgttctcctggagggatagtataatcgtaagcgctatataaatcatatccggcggcgtaaggtgattgcctagtaggagatttagctctgttagtttccttaacaaatctaactggtgagttaatattcatgttgaacataaaactaatattttatttcaaaattatttaccatcccatatattccatgaataagtgtgatgattgtacacttctatagtatctatatacgattcacgataaaatcctcctatcaatagcagtttattatccactatgatcaattctggattatccctcggataaataggatcatctatcagagtccatgtattgctggattcacaataaaattccgcatttctaccaaccaagaataaccttctaccgaacactaacgcgcatgatttataatgaggataataagtggatggtccaaactgccactgatcatgattgggtagcaaatattctgtagttgtatcagtttcagaatgtcctcccattacgtatataacattgtttatggatgccactgctggattacatctaggtttcagaagactcggcatattaacccaagcagcatccccgtggaaccaacgctcaacagatgtgggatttggtagacctcctactacgtataatttattgttagcgggtatcccgctagcatacagtctggggctattcatcggaggaattggaatccaattgtttgatatataatttaccgctatagcattgttatgtatttcattgttcatccatccaccgatgagatatactacttctccaacatgagtacttgtacacatatggaatatatctataatttgatccatgttcataggatactctatgaatggatacttgtatgatttgcgtggttgtttatcacaatgaaatattttggtacagtctagtatccattttacattatttatacctctgggagaaagataatttgacctgattacatttttgataaggagtagcagatttcctaatttatttcttcgctttatataccacttaatgacaaaatcaactacataatcctcatctggaacatttagttcatcgctttctagaataagtttcatagatagataatcaaaattgtctatgatgtcatcttccagttccaaaaagtgtttggcaataaagtttttagtatgacataagagattggatagtccgtattctatacccatcatgtaacactcgacacaatattcctttctaaaatctcgtaagataaagtttatacaagtgtagatgataaattctacagaggttaatatagaagcacgtaataaattgacgacgttatgactatctatatatacctttccagtatacgagtaaataactatagaagttaaactgtgaatgtcaaggtctagacaaacccttgtaactggatctttatttttcgtgtatttttgacgtaaatgtgtgcgaaagtaaggagataactttttcaatatcgtagaattgactattatattgccacctatagcatcaataattgttttgaatttcttagtcatagacaatgctaatatattcttacagtacacagtattaacaaatatcggcatttatgtttctttaaaagtcaacatctaaagaaaaatgattatcttcttgagacataactcccattttttggtattcacccacacgtttttcgaaaaaattagtttttccttccaatgatatattttccatgaaatcaaacggattggtaacattataaatttttttaaatcccaattcagaaatcaatctatccgcgacgaattctatatatgttttcatcatttcacaattcattcctataagtttaactggaagagccgcagtaagaaattcttgttcaatggataccgcatctgttataatagatctaacggtttcttcactcggtggatgcaataaatgtttaaacatcaaacatgcgaaatcgcagtgcagaccctcgtctctactaattagttcgttggaaaacgtgagtccgggcattaggccacgctttttaagccaaaatatggaagcgaatgatccagaaaagaagattccttctactgcagcaaaggcaataagtctctctccataaccggcgctgtcatgtatccacttttgagcccaatcggccttcttttttacacaaggcatcgtttctatggcattaaagagatagtttttttcattactatctttaacataagtatcgatcaaaagactatacatttccgaatgaatgttttcaatggccatctgaaatccgtagaaacatctagcctcggtaatctgtacttctgtacaaaatcgttccgccaaattttcattcactattccgtcactggctgcaaaaaacgccaatacatgttttataaaatatttttcgtctggtgttagtttattccaatcattgatatctttagatatatctacttcttccactgtccaaaatgatgcctctgcctttttatacatgttccagatgtcataatattggattgggaaaataacaaatctatttggatttggtgcaaggatgggttccataactaaattaacaataacaataaattttttttcagttatctatatgcctgtacttggatcttttgtacatcgatatcgccgcaatcactacaataattacaagtattattgatagcattgttattagtactatcataattaaattatcgacattcatgggtgctgaataatcgttattatcatcattatcattttgtaattgtgacatcatactagataaatcgtttgcgagattgttgtgggaagcgggcatggaggatgaattatcgttattattatttaacgcctcccattcggattcacaaatgttacgcacattcaacattttatggaaactataattttgtgaaaacagataacaagaaaactcgtcatcgttcaaatttttaacgatagtaaaccgattaaacgtcgagctaatttctaacgctagcgactctgttggatatgggtttccagatatatatcttttcagttcccctacgtatctataatcatctgtaggaaatggaagatatttccatttatctactgttcctaatatcatatgtggtggtgtagtagaaccattaagcgcgaaagatgttatttcgcatcgtattttaacttcgcaataatttctggttagataacgcactctaccagtcaagtcaatgatattagcctttacagatatattcatagtagttgtaacgatgactccatcttttagatgcgatactcctttgtatgtaccagaatcttcgtaccgcaaactcgatatatttaaacaagttaatgagatattaacgcgttttatgaatgatgatatataaccagaagttttatcctcggtggctagcgctataaccttatcattataataccaactagtgtgattaatatgtgacacgttagtgtgggtacaaatatgtacattatcgtctacgtcgtattcgatacatccgcatacagccaacaaatataaaatgacaaatactctaacgccgttcgtacccatcttgatgcggtttaataaatgttttgatttcaatttattgtaaaaaaagattcggttttatactgttcgatattctcattgcttatattttcatctatcatctccacacagtcaaatccgtggttagcatgcacctcatcaaccggtaaaagactatcggactcttctatcattataactctagaatatttaatttggtcattattaatcaagtcaattatcttatttttaacaaacgtgagtattttactcattttttataaaaacttttagaaatatacagactctatcgtgtgtctatatcttctttttatatccaatgtatttatgtctgatttttcttcatttatcatatataatggtccaaattctacacgtgcttcggattcatccagatcattaaggttcttataattgtaacatccttctcttccctcttctacatcttccttcttattcttattcttagcgtcacagaatctaccacagcaggatcccatgacgagcgtcatattaaactaatccattttcaattataatatacgattagtaatgaccattaaaataaaaaatattcttcataaccggcaagaaagtgaaaagttcacattgaaactatgtcagtagtatacatcatgaaatgatgatatatatatactctattttggtggaggattatatgatataattcgtggataatcattcttaagacacatttcttcattcgtaaatcttttcacgttaaatgagtgtccatattttgcaatttcttcatatgatggcggtgtacgtggacgaagctgctcctgttcttgttgtagtcgccgactgtcgtgtttgcgtttagatccctccattatcgcgattgcgtagatggagtactattatataccttgtaattaaatttttttattaattaaacgtataaaaacgttccgtatctgtatttaagagccagatttcgtctaatagaacaaatagctacagtaaaaataactagaataattgctacacccactagaaaccacggatcgtaatacggcaatcggttttcgataataggtggaacgtatattttatttaaggacttaacaattgtctgtaaaccacaatttgcttccgcggatcctgtattaactatctgtaaaagcatatgttgaccgggcggagccgaacattctccgatatctaatttctgtatatctataatattattaacctccgcatacgcattacagttcttttctagcttggataccgcactaggtacatcgtctagatctattcctatttcttcagcgatagctcttctatccttttccggaagcaatgaaatcacttcaataaatgattcaaccatgagtgtgaaactaagtcgagaattactcatgcatttgttagttattcggagcgcgcaatttttaaactgtcctataacctctcctatatgaatagcacaagtgacattagtagggatagaatgttgagctaatttttgtaaataactatctataaaaagattatacaaagttttaaactctttagtttccgccatttatccagtctgagaaaatgtctctcataataaatttttccaagaaactaattgggtgaagaatggaaacctttaatctatatttatcacagtctgttttggtacacatgatgaattcttctaatgctgtactaaattcgatatctttttcgatttctggatatgtttttaataaagtatgaacaaagaaatggaaatcgtaataccagttatgttcaactttgaaattgttttttattttcttgttaatgattccagccacttgggaaaagtcaaagtcgtttaatgccgatttaatacgttcattaaaaacaaactttttatcctttagatgaattattattggttcattggaatcaaaaagtaagatattatcgggtttaagatctgcgtgtaaaaagttgtcgcaacagggtagttcgtagattttaatgtataacagagccatctgtaaaaagataaactttatgtattgtaccaaagatttaaatcctaatttgatagctaactcggtatctactttatctgccgaatacagtgctaggggaaaaattataatatttcctctttcgtattcgtagttagttctcttttcatgttcgaaaaagtgaaacatgcggttaaaatagtttataacattaatattactgttaataactgccggataaaagtgggatagtaatttcacgaatttgatactgtcctttctctcgttaaacgcctttaaaaaaactttagaagaatatctcaatgagagttcctgaccatccatagtttgtatcaataatagcaacatatgaagaacccgtttatacagagtatgtaaaaatgttaatttatagtttaatcccatggcccacgcacacacgattaattttttttcatctccctttagattgttgtatagaaatttgggtactgtgaactccgccgtagtttccatgggactatataattttgtggcctcgaatacaaattttactacatagttatctatcttaaagactataccatatcctcctgtagatatgtgataaaaatcgtcgtttataggataaaatcgtttatccttttgttggaaaaaggatgaattaatgtaatcattctcttctatctttagtagtgtttccttattaaaattcttaaaataatttaacaatctaactgacggagcccaattttggtgtaaatctaattgggacattatgttgttaaaatacaaacagtctcctaatataacagtatctgataatctatggggagacatccattgatattcaggggatgaatcattggcaacacccatttattgtacaaaaagccccaatttacaaacgaaagtccaggtttgatagagacaaacaattaactattttgtctctgtttttaatttctttggtaatgaaattattcacaatatcagtatcttctttatctaccagagattttactaacttgataaccttggctgtctcattcaatagggtagtaatatttgtatgtgtgatattgatatctttttgaattgtttcttttagaagtgattctttgatggtgccagcatacgaattacaataatgcagaaactcagttaacatgcaggaattatagtaagccaattccaattgttgcctgtattgtattagagtattaatatgcgcaatggtgtccttgcgtttctctgatagaatgcgagcagcgattttggcgttatcatttgacgatatttctggaatgacgaatcctgtttctactaactttttggtaggacaaagtgaaacaatcaagaagatagcttctcctcctatttgtggaagaaattgaactcctctagatgatctactgacgatagtatctccttgacagatattggaccgaattacagaagtacctggaatgtaaagccctgaaaccccctcattttttaagcagattgttgccgtaaatcctgcactgtgaccaagatagagagctcctttggtgaatccatctctatgtttcagtttaaccaagaaacagtcagctggtctaaaatttccatctctatctaatacagcatctaacttgatgtcaggaactatgaccggtttaatgttatatgtaacattgagtaaatccttaagttcataatcatcactgtcatcagttatgtacgatccaaacaatgtttctactggcatagtggatacgaagatgctatccatcagaatgtttccctgattagtattttctatatagctattcttctttaaacgattttccaaatcagtaactatgttcatttttttaggagtaggacgcctagccagtatggaagaggattttctagatcctctcttcaacatctttgatctcgatggaatgcaaaaccccatagtgaaacaaccaacgataaaaataatattgtttttcactttttataattttaccatctgactcatggattcattaatatctttataagagctactaacgtataattctttataactgaactgagatatatacaccggatctatggtttccataattgagtaaatgaatgctcggcaataactaatggcaaatgtatagaacaacgaaattatactagagttgttaaagttaatattttctatgagctgttccaataaattatttgttgtaactgcgttcaagtcataaatcatcttgatactatccagtaaaccgtgtttaagttctggaatattatcatcccattgtaaagcccctaattcgactatcgaatatcctgctctgatagcagtttcaatatcgacggacgtcaatactgtaataaaggtggtagtattgtcatcatcgtgataaactacgggaatatggtcgttagtaggtacggtgactttacacaacgcgatatataactttccttttgtaccatttttaacgtagttgggacgtcctgcagggtattgttttgaagaaatgatatcgagaacagatttgatacgatatttgttggattcctgattattcactataatataatctagacagatagatgattcgataaatagagaaggtatatcgttggtaggataatacatccccattccagtattctcggatactctattgatgacactagttaagaacatgtcttctattctagaaaacgaaaacatcctacatggactcattaaaacttctaacgctcctgattgtgtctcgaatgcctcgtacaaggatttcaaggatgccatagattctttgaccaacgatttagaattgcgtttagcatctgatttttttattaaatcgaatggtcggctctctggtttgctaccccaatgataacaatagtcttgtaaagataaaccgcaagaaaatttatacgcatccatccaaataaccctagcaccatcggatgatattaatgtattattatagattttccatccacaattattgggccagtatactgttagcaacggtatatcgaatagattactcatgtaacctactagaatgatagttcgtgtactagtcataatatctttaatccaatctaagaaatttaaaattagattttttacactgttaaagttaacaaaggtattacccggatacgtggatatcatatatggcattggtccattatcagtaatagctccataaactgatacggcgatggtttttatatgtgtttgatctaacgaggaagaaattcgcgcccacaattcatctctagatatgtatttaatatcaaacggtaacacatcaatttcgggacgcgtatatgtttctaaatttttaatccaaatataatgatgacctatatgccctattatcatactgtcaactatagtacacctagagaacttacgatacatctgtttcctataatcgttaaattttacaaatctataacatgctaaaccttttgacgacagccattcattaatttctgatatggaatctgtattctcgataccgtattgttctaaagccagtgctatatctccctgttcgtgggaacgctttcgtataatatcgatcaacggataatctgaagtttttggagaataatatgactcatgatctatttcgtccataaacaatctagacataggaattggaggcgatgatcttaattttgtgcaatgagtcgtcaatcctataacttctaatcttgtaatattcatcatcgacataatactatctatgttatcatcgtatattagtataccacggccttcttcatttcgtgccaaaataatatacagtcttaaataattacgcaatatctcaatagtttcataattgttagctgttttcatcaagatttgtaccctgtttaacatgatggcgttctatacgtctctattttcttttttttaaatttttaacgatttactgtggctagatacccaatctctctcaaatatttttttagcctcgcttacaagctgtttatctatactattaaaactgacgaatccgtgattttggtaatgggttccgtcgaaatttgccgaagtgatatgaacatattcgtcgtcgactatcaacaattttgtattattctgaatagtgaaaaccttcacagatagatcattttgaacacacaacgcgtctagacttctggcggttgccatagaatatacgtcgttcttatcccaattaccaactagaagtctgatcttaactcctctattaatggctgcttctataatggagttgtaaatgtcgggccaatagtagctattaccgtcgacacgtgtagtgggaactatggccaaatgttcaatatctatactagtcttagccgacttgagtttatcaataactacatcggtatctagatctctagaatatcccaataggtgttccggagaatcagtaaagaacactccacctataggattcttaatatgatacgcagtgctaactggcaaacaacaagccgcagagcataaattcaaccatgaattttttgcgctattaaaggctttaaaagtatcaaatcttctacgaagatctgtggccagcgggggataatcagaatatacacctaacgttttaatcgtatgtatagatcctccagtaaatgacgcgtttcctacataacatctttcatcatctgacacccaaaaacaaccgagtagtagtcccacattattttttttatctatattaacggttataaaatttatatccgggcagtgactttgtagctctcccagatttcttttccctcgttcatctagcaaaactattattttaatccctttttcagatgcctcttttagtttatcaaaaataagcgctcccctagtcgtactcagaggattacaacaaaaagatgctatgtatatatatttcttagctagagtgataatttcgttaaaacattcaaatgttgttaaatgatcggatctaaaatccatattttctggtagtgtttctaccagcctacattttgctcccgcaggtaccgatgcaaatggccacatttagttaacataaaaacttatacatcctgttctatcaacgattctagaatatcatcggctatatcgctaaaattttcatcaaagtcgacatcacaacctaactcagtcaatatattaagaagttccatgatgtcatcttcgtctatttctatatccgtatccattgtagattgttgaccgattatcgagtttaaatcattactaatactcaatccttcagaatacaatctgtgtttcattgtaaatttataggcggtgtatttaagttggtagattttcaattatgtatcaatatagcaacagtagttcttgctcctccttgattctagcatcctcttcattattttcttctacgtacataagcatgtccaatacgttagacaacacaccgacgatggcggccgccacagacacgaatatgactagaccgatgaccatttaaaaacccctctctagctttcacttaaactgtatcgattattcttttagaacatgtataatataaaaacattattctatttcgaatttaggcttccaaaaatttttcatccgtaaaccgataataatatatatagacttgttaatagtcggaataaatagattaatgcttaaactatcatcatctccacgattagagatacaatatttacattttttttgctgtttcgaaactttatcaatacacgttaatacaaacccaggaaggagatattgaaactgaggctgttgaaaatgaaacggtgaatacaataattcagataatgtaaaatcatgattccgtattctgatgatattagaactgctaatggatgtcgatggtatgtatctaggagtatctattttaacaaagcatcgatttgctaatatacaattatccttttgattaattgttattttattcatattcttaaaaggtttcatatttatcaattcttctacattaaaaatttccatttttaatttatgtagcccccgcaatactcctcattacgtttcattttttgtctataatatccattttgttcatctcggtacatagattatccaattgagaagcgcatttagtagttttgtacattttaagtttattgacgaatcgtcgaaaactagttatagttaacattttattatttgataccctgatattaatacccctgccgttactattatttataactgatgtaatccacgtaacattagaattaattatcgatagtaatgcatcgacgcttccaaaattgtctattataaactcaccgataatttttttattgcatgttttcatattcattaggattatcaaatctttaatcttactacgattgtatgcgttgatattgcaagacgtcattctaaaagacggaggatctccatcaaatgccagacaatcacgtacaaagtacatggaaataggttttgttctattgcgcatcatagatttatatagaacacccgtagaaatactaatttgttttactctataaaatactaatgcatctatttcatcgttttgtataacgtctttccaagtgtcaaattccaaatttttttcattgatagtaccaaattcttctatctctttaactacttgcatagataggtaattacagtgatgcctacatgccgttttttgaaactgaatagatgcgtctagaagcgatgctacgctagtcacaatcaccactttcatatttagaatatatgtatgtaaaaatatagtagaatttcattttgtttttttctatgctataaatgaattctcattttgcatctgctcatactccgttttatatcaataccaaagaaggaagatatctggttctaaaagccgttaaagtatgcgatgttagaactgtagaatgcgaaggaagtaaagcttcctgcgtactcaaagtagataaaccctcatcgcccgcgtgtgagagaagaccttcgtccccgtccagatgcgagagaatgaataaccctggaaaacaagttccgtttatgaggacggacatgctacaaaatatgttcgcggctaatcgcgacaacgtggcgtcgagacttttgaactaaaatacaattatatccttttcgatattaataaatccgtgtcgtccaggttttttatctctttcagtatgtgaatagataggtattttatctctattcatcatcgaatttaagagatccgataaacattgtttgtattctccagatgtcagcatctgatacaacaatatatgtgcacataaacctctggcacttatttcatgtaccttccccttatcactaaggagaatagtatttgagaaatatgtatacatgatattatcatgaattagatatacagaatttgtaacactctcgaaatcacacgatgtgtcggcgttaagatctaatatatcactcgataacacattttcatctagatacactagacattttttaaagctaaaatagtctttagtagtgacagtaactatgcgattattttcatcgatgatacatttcatcggcatattattacgcttaccatcaaagactataccatgtgtatatctaacgtattctagcatggttgccatacgcgcattaaacttttcaggatctttggatagatcttccaatctatctatttgagaaaacatttttatcatgttcaatagttgaaacgtcggatccactatatagatattatctataaagattttaggaactacgttcatggtatcctggcgaatattaaaactatcaatgatatgattatcgttttcatcttttatcaccatatagtttctaagatatgggattttacttaatataatattatttcccgtgataaattttattagaaaggccaaatctataagaaaagttctagaattagtctgaagaatatctatatcgccgtaccgtatatttggattaattagatatagagaatatgatccgtaacatatacaacttttattatggcgtctaagatattcttccatcaacttattaacatttttgactagggaagatacattatgacgtcccattacttttgccttgtctattactgcgacgttcatagaatttagcatatctcttgccaattcttccattgatgttacattataagaaattttagatgaaattacatttggagctttaatagtaagaactcctaatatgtccgtgtatgtggtcactaatacagattgtagttctataatcgtaaataatttacctatattatatgtttgagtctgtttagaaaagtagctaagtatacgatcttttatttctgatgcagatgtattaacatcggaaaaaaatctttttttattcttttttactaaagatacaaatatgtctttgttaaaaacagttattttttgaatatttctagcttgtaattttaacatatgatattcgttcacactaggtactctgcctaaataggtttctataatctttaatgtaatattaggaagagtattctgatcaggattcctattcattttgaggatttaaaactctgattattgtctaatatggtctctacgcaaactttttcacagagcgatagagtttttgataactcgtttttcttaagaaatataaaactactgtctccagagctcgctctatcttttattttatttaattcgatacaaactcctgatactggttcagaaagtaattcattaattttcagtcctttatagaagatatttaatatagataatacaaaattttcagttcttgatatcgatctgattgatcctagaactagatatattaataacgtgctcattaggcagtttatggcagcttgataattagatatagtatattccagttcatatttattagataccgcattgcccagattttgatattctatgaattcctctgaaaataaatccaaaataactaaacattctattttttgtggattagtgtactctcttccctctatcatgttcactactggtgtccacgatgataaatatctagagggaatataatatagtccataggatgccaatctagcaatgtcgaataactgtaatttgattcttcgttcttcattatgaattgattcttgaggtataaacctaacacaaattatattattagacttttcgtatgtaatgtctttcatgttataagtttttaatcctggaatagaatctattttaatgaggcttttaaacgcagagttctccaacgagtcaaagcataatactctgttgtttttcttatatacgatgttacgattttcttctttgaatggaataggtttttgaattagtttataattacaacataatagataaggaagtgtgcaaatagtacgcggaaaaaacataatagctcccctgttttcatccatggttttaagtaaatgatcactggcttctttagtcaatggatattcgaacattaaccgtttcatcatcattggacagaatccatatttcttaatgtaaagagtgatcaaatcattgtgtttattgtaccatcttgttgtaaatgtgtattcggttatcggatctgctcctttttctattaaagtatcgatgtcgatctcgtctaagaattcaactatatcgacatatttcatttgtatacacataaccattactaacgtagaatgtataggaagagatgtaacgggaacagggtttgttgattcgcaaactattctaatacataattcttctgttaatacgtcttgcacgtaatctattatagatgccaagatatctatataattattttgtaagatgatgttaactatgtgatctatataagtagtgtaataattcatgtatttcgatatatgttccaactctgtctttgtgatgtctagtttcgtaatatctatagcatcctcaaaaaatatattcgcatatattcccaagtcttcagttctatcttctaaaaaatcttcaacgtatggaatataataatctattttacctcttctgatatcattaatgatatagtttttgacactatcttctgtcaattgattcttattcactatatctaagaaacggatagcgtccctaggacgaactactgccattaatatctctattatagcttctggacataattcatctattataccagaattaatgggaactattccgtatctatctaacatagttttaagaaagtcagaatctaagacctgatgttcatatattggttcatacatgaaatgatctctattgatgatagtgactatttcattctctgaaaattggtaactcattctatatatgctttccttgttgatgaaggatagaatatactcaatagaatttgtaccaacaaactgttctcttatgaatcgtatatcatcatctgaaataatcatgtaaggcatacatttaacaattagagacttgtctcctgttatcaatatactattcttgtgataatttatgtgtgaggcaaatttgtccacgttctttaattttgttatagtagatatcaaatccaatggagctacagttcttggcttaaacagatatagtttttctggaacgaattctacaacattattataaaggactttgggtagataagtgggatgaaatcctattttaattaatgcgatagccttgtcctcgtgcagatatccaaacgcttttgtgatagtatggcattcattgtctagaaacgctctacgaatatctgtgacagatatcatctttagagaatatactagtcgcgttaatagtactacaatttgtattttttaatctatctcaataaaaaaattaatatgtatgattcaatgtataactaaactactaactgttattgataactagaatcagaatctaatgatgacgtaaccaagaagtttatctactgccaatttagctgcattatttttagcatctcgtttagattttccatctgccttatcgaatactcttccgtcgatgtctacacaggcataaaatgtaggagagttactaggccccactgattcaatacgaaaagaccaatctctcctagtaatttggcagtactcattaataacggtgacagggttagcacctttccaatcaataatttttttagccggaataacatcatcaaaagacttatgatcctctctcattgatttttcgcgggatacatcatctattatgacgtcagccatagcatcagcatccggcttatccgcctccgttgtcataaaccaacgaggaggaatatcgtcggagctgtacaccatagcactacgttgaagatcgtacagagctttattaacttctcgcttctccatattaagttgtctagttagttgtgcagcagtagctccttcgattccaatggttttaatagcctcacacacaatctctgcgttagaacgctcgtcgatatagattttagacatttttagagagaactaacgcaatcagtaataaaactaatttattttatcattttttttattcatcatcctctggtggttcgtcgtttctatcgaatgtagctctgattaacccgtcatctataggtgatgctggttctggagattctggaggagatggattattatctggaagaatctctgttatttccttgttttcatgtatcgattgcgttgtaacattaagattgcgaaatgctctaaatttgggaggcttaaagtgttgtttgcaatctctacacgcgtgtctaactagtggaggttcgtcagcggctctagtttgaatcatcatcggcgtagtattcctacttttacagttaggacacggtgtattgtatttctcgtcgagaacgttaaaataatcgttgtaactcacatcctttattttatctatattgtattctactcctttcttaatgcattttataccgaataagagatagcgaaggaattctttttcggtgccgctagtacccttaatcatatcacatagtgttttatattccaaatttgtggcaatagacggtttatttctatacgatagtttgtttctggaatcctttgagtattctataccaatattattctttgattcgaatttagtttcttcgatattagattttgtattacctatattcttgatgtagtactttgatgatttttccatggcccattctattaagtcttccaagttggcatcatccacatattgtgatagtaattctcggatatcagtagcggttaccgccattgatgtttgttcattggatgagtaactactaatgtatacattttccatttataacacttatgtattaactttgttcatttatattttttcattattatgttgatattaacaaaagtgaatatatatatgttaataattgtattgtggttatacggctacaattttataattagtgaaagtcagtgtccgatgatcaatgacgatagctttactctgaaaagaaagtatcaaatcgatagtgcggagtcaacaataaaaatggataagaagaggacaaagtttcagaatagagccaaaatggtaaaagaaataaatcagacaataagagcagcacaaactcattacgagacattgaaactaggatacataaaatttaagagaatgattaggactactactctagaagatatagcaccatctattccaaataatcagaaaacttataaactattctcggacatttcagccatcggcaaagcatcacggaatccaagtaagatggtatatgctctgctgctttacatgtttcccaatttgtttggagatgatcatagattcattcgttatagaatgcatccaatgagtaaaatcaaacacaagatcttctctcctttcaaacttaatcttattagaatattagtggaagaaagattctataataatgaatgcagatctaataaatggagaataattggaacacaagttgataaaatgttgatagctgaatctgataaatatacaatagatgcaaggtataacctaaaacccatgtatagaatcaagggaaaatctgaagaagataccctctttatcaaacagatggtagaacaatgtgtgacatcccaggaattggtggaaaaagtgttgaagatactgtttagagatttgttcaagagtggagaatacaaagcgtacagatacgatgatgatgtagaaaatggatttattggattggatacactaaaattaaacattgttcatgatatagttgaaccatgtatgcctgttcgtaggccagtggctaagatactgtgtaaagaaatggtaaataaatactttgagaatccgctacatattattggtaaaaatcttcaagagtgcattgactttgttagtgaataggcatttcatctttctccaatactaattcaaattgttaaattaataatggatagtataaatagttattagtgataaaatagtaaaaataattattagaataagagtgtagtatcatagataactctcttctataaaaatggattttattcgtagaaagtatcttatatacacagtagaaaataatatagattttttaaaggatgatacattaagtaaagtaaacaattttaccctcaatcatgtactagctctcaagtatctagttagcaattttcctcaacatgttattactaaggatgtattagctaataccaatttttttgttttcatacatatggtacgatgttgtaaagtgtacgaagcggttttacgacacgcatttgatgcacccacgttgtacgttaaagcattgactaagaattatttatcgtttagtaacacaatacaatcgtacaaggaaaccgtgcataaactaacacaagatgaaaaatttttagaggttgccaaatacatggacgaattaggagaacttataggcgtaaattatgacttagttcttaatccattatttcacggaggggaacccatcaaagatatggaaatcatttttttaaaactgtttaagaaaacagacttcaaagttgttaaaaaattaagtgttataagattacttatttgggcttacctaagcaagaaagatacaggcatagagtttgcggataatgatagacaagatatatatactctatttcaacaaactggtagaatcgtccatagcaatctaacagaaacgtttagagattatatctttcccggagataagactagctattgggtgtggttaaacgaaagtatagctaatgatgcggatattgttcttaatagacacgccattaccatgtatgataaaattcttagttatatatactctgagataaaacaaggacgcgttaataaaaacatgcttaagttagtttatatctttgagcctgaaaaagatatcagagaacttctgctagaaatcatatatgatattcctggagatatcctatctattattgatgcaaaaaacgacgattggaaaaaatattttattagtttttataaagctaattttattaacggtaatacatttattagtgatagaacgtttaacgaggacttattcagagttgttgttcaaatagatcccgaatatttcgataatgaacgaattatgtctttattctctacgagtgctgcggacattaaacgatttgatgagttagatattaataacagttatatatctaatataatttatgaggtgaacgatatcacattagatacaatggatgatatgaagaagtgtcaaatctttaacgaggatacgtcgtattatgttaaggaatacaatacatacctgtttttgcacgagtcggatcccatggtcatagagaacggaatactaaagaaactgtcatctataaaatccaagagtagacggctgaacttgtttagcaaaaacattttaaaatattatttagacggacaattggctcgtctaggtcttgtgttagatgattataaaggagacttgttagttaaaatgataaaccatcttaagtctgtggaggatgtatccgcattcgttcgattttctacagataaaaaccctagtattcttccatcgctaatcaaaactattttagctagttataatatttccatcatcgtcttatttcaaaggtttttaagagataatctatatcatgtagaagaattcttggataaaagcatccatctaaccaagacggataagaaatatatacttcaattgataagacacggtagatcatagaacagaccaaatatattattaataatttgtatatacatagatataattatcacatattaaaaattcacacatttttgataaatgggaactgctgcaacaattcagactcccaccaaattaatgaataaagaaaatgcagaaatgattttggaaaaaattgttgatcatatagttatgtatattagtgacgaatcaagtgattcagaaaataatcctgaatatattgattttcgtaacagatacgaagactatagatctctcattataaaaagtgatcacgagtttgtaaagctatgtaaaaatcatgcagagaaaagttctccagaaacgcaacaaatgattatcaaacacatatacgaacaatatcttattccagtatctgaagtactattaaaacctataatgtccatgggtgacataattacatataacggatgtaaagacaatgaatggatgctagaacaactctctaccctaaactttaacaatctccgcacatggaactcatgtagcataggcaatgtaacgcgtctgttttatacattttttagttatctgatgaaagataaactaaatatataagtataatcccattctaatactttaacctgatgtattagcatcttattagaatattaacctaactaaaagacataacataaaaactcattacatagttgataaaaagcggtaggatataaatattatggctgccaccgttccgcgttttgacgacgtgtacaaaaatgcacaaagaagaattctagatcaagaaacattttttagtagaggtctaagtagaccgttaatgaaaaacacatatctatttgataattacgcgtatggatggataccagaaactgcaatttggagtagtagatacgcaaacttagatgcaagtgactattatcccatttcgttgggattacttaaaaagttcgagtttctcatgtctctatataaaggtcctattccagtatacgaagaaaaagtaaatactgaattcattgctaatggatcgttctctggtagatacgtatcatatcttcgaaagttttctgctcttccaacaaacgagtttattagttttttgttactgacttccattccaatctataatatcttgttctggtttaaaaatactcagtttgatattactaaacacacattattcagatacgtctatacagataatgccaaacacctggcgttggctaggtatatgcatcaaacaggagactataagcctttgtttagtcgtctcaaagagaattatatatttaccggtcccgttccaataggtatcaaagatataaatcaccctaatcttagtagagcaagaagtccatccgattatgagacattagctaatattagtactatattgtactttaccaagtatgatccggtattaatgtttttattgttttacgtacctgggtattcaattactacaaaaattactccagccgtagaatatctaatggataaactgaatctaacaaagagcgacgtacaactgttgtaaattattttatgcttcgtaaaatgtaggttttgaaccaaacattctttcaaagaatgagatgcataaaactttattatccaatagattgactatttcggacgtcaatcgtttaaagtaaacttcgtaaaatattctttgatcactgccgagtttaaaacttctatcgataattgtttcatatgttttaatatttacaagttttttggtccatggtacattagccggacaaatatatgcaaaataatatcgttctccaagttctatagtttctggattatttttattatattcagtaaccaaatacatattagggttatctgcggatttataatttgagtgatgcattcgactcaacataaataattctagaggagacgatctactatcaaattcggatcgtaaatctgtttctaaagaacggagaatatctatacatacctgattagaattcatccgtccttcagacaacatctcagacagtctggtcttgtatgtcttaatcatattcttatgaaacttggaaacatctcttctagtttcactagtacctttattaattctctcaggtacagattttgaattcgacgatgccgagtatttcatcgttgtatatttcttcttcgattgcataatcagattcttatataccgcctcaaactctattttaaaattattaaacaatactctattattaatcagtcgttctaactcctttgctatttctatggacttatctacatcttgactgtctatctctgtaaacacggagtcggtatctccatacacgctacgaaaacgaaatctgtaatctataggcaacgatgttttcacaatcggattaatatctctatcgtccatataaaatggattacttaatggattggcaaaccgtaacataccgttagataactctgctccatttagtaccgattctagatacaagatcattctacgtcctatggatgtgcaactcttagccgaagcgtatgagtatagagcactatttctaaatcccatcagaccatatactgagttggctactatcttgtacgtatattgcatggaatcatagatggccttttcagttgaactggtagcctgttttaacatctttttatatctggctctctctgccaaaaatgttcttaatagtctaggaatggttccttctatcgatctatcgaaaattgctatttcagagatgaggttcggtagtctaggttcacaatgaaccgtaatatatctaggaggtggatatttctgaagcaagagctgattatttatttcttcttccaatctattggtactaacaacgacaccgactaatgtttccggagatagatttccaaagatacacacattaggatacagactgttataatcaaagattaatacattattactaaacattttttgttttggagcaaataccttaccgccttcataaggaaacttttgttttgtttctgatctaactaagatagttttagtttccaacaatagctttaacagtggacccttgatgactgtactcgctctatattcgaataccatggattgaggaagcacatatgttgacgcacccgcgtctgtttttgtttctactccataatactcccacaaatactgacacaaacaagcatcatgaatacagtatctagccatatctaaagctatgtttagattataatccttatacatctgagctaaatcaacgtcatcctttccgaaagataatttatatgtatcattaggtaaagtaggacataatagtacgactttaaatccattttcccaaatatctttacgaattactttacatataatatcctcatcaacagtcacataattacctgtggttaaaacctttgcaaatgcagcggctttgcctttcgcgtccgtagtatcgtcaccgatgaacgtcatttctctaactcctctatttaatactttacccatgcaactgaacgcgttcttggatatagaatccaatttgtacgaatccaatttttcagatttttgaatgaatgaatatagatcgaaaaatatagttccattattgttattaacgtgaaacgtagtattggccatgccgcctactcccttatgactagactgatttctctcataaatacagagatgtacagcttcctttttgtccggagatctaaagataatcttctctcctgttaataactctagacgattagtaatatatctcagatcaaagttatgtccgttaaaggtaacgacatagtcgaacgttagttccaacaattgtttagctattcgtaacaaaactatttcagaacataaaactagttctcgttcgtaatccatttccattagtgactgtatcctcaaacatcctctatcgacggcttcttgtatttcctgttccgttaacatctcttcattaatgagcgtaaacaataatcgtttaccacttaaatcgatataacagtaacttgtatgcgagattgggttaataaatacagaaggaaacttcttatcgaagtgacactctatatctagaaataagtacgatcttgggatatcgaatctaggtatttttttagcgaaacagttacgtggatcgtcacaatgataacatccattgttaatctttgtcaaatattgctcgtccaacgagtaacatccgtctggagatatcccgttagaaatataaaaccaactaatattgagaaattcatccatggtggcattttgtatgctgcgtttctttggctcttctatcaaccacatatctgcgacggagcattttctatctttaatatctagattataacttattgtctcgtcaatgtctatagttctcatctttcccaacggcctcgcattaaatggaggaggagacaatgactgatatatttcgtccgtcactacgtaataaaagtaatgaggaaatcgtataaatacggtctcaccatttcgacatctggatttcagatataaaaatctgttttcaccgtgactttcaaaccaattaatgcaccgaacatccatttatagaatttagaaatatattttcatttaaatgaatcccaaacattggggaagagccgtatggaccattatttttatagtactttcgcaagcgggtttagacggcaacatagaagcgtgtaaacgaaaactatatactatagttagcactcttccatgtcctgcatgtagacggcacgcgactatcgctatagaggacaataatgtcatgtctagcgatgatctgaattatatttattattttttcatcagattatttaacaatttggcatctgatcccaaatacgcgatcgatgtgacaaaggttaaccctttataaacttaacccattataaaacttatgattagtcacgactgaaataaccgcgtgattattttttggtataattctacacggcatggtttctgtgactatgaattcaacccccgttacattagtgaaatctttaacaaacagcaagggttcgtcaaagacataaaactcattgtttacaatcgaaatagaccccctatcacacttaaaataaaaaatatccttatcctttaccaccaaataaaattctgattggtcaatgtgaatgtattcacttaacagttccacaaatttatttattaactccgaggcacatacatcgtcggtattttttatggcaaactttactcttccagcatccgtttctaaaaaaatattaacgagttccatttatatcatccaatattattgaaatgacgttgatggacaaatgatacaaataagaaggtacggtacctttgtccaccatctcctccaattcatgctctattttgtcattaactttaatgtatgaaaacagtacgccacatgcttccatgacagtgtgtaacactttggatacaaaatgtttgacattagtataattgttcaagactgtcaatctataatagatagtagctataatatattctatgatggtattgaagaagatgacaaccttggcatattgatcatttaacacagacatggtatcaacagatagcttgaatgaaagagaatcagtaattggaataagcgtcttctcgatggagtgtccgtataccaacatgtctgatattttgatgtattccattaaattatttagttttttctttttattctcgttaaacagcatttctgtcaacggaccccaacatcgttgaccgattaagttttgattgatttttccgtgtaaggcgtatctagtcagatcgtatagcctatccaataatccatcgtctgtgtgtagatcacatcgtacactttttaattctctatagaagagcgacagacatctggagcaattacagacagcaatttctttattctctacagatgtaagatacttgaagacattcctatgatgatgcagaattttggataacacggtattgatggtatctgttaccataattcctttgatggctgatagtgtcagagcacaagatttccaatctttgacaatttttagcaccattatctttgttttgatatctatatcagacagcatggtgcgtctgacaacacaaggattaagacggaaagatgaaatgattctctcaacatcttcaatggataccttgctattttttctggcattatctatatgtgcgagaatatcctctagagaatcagtatcctttttgatgatagtggatctcaatgacatgggacgtctaaaccttcttattctatcaccagattgcatggtgatttgtcttctttcttttatcataatgtaatctctaaattcatcggcaaattgtctatatctaaaatcataatatgagatgtttacctctacaaatatctgttcgtccaatgttagagtatttacatcagttttgtattccaaattaaacatggcaacggatttaattttatattcctctattaagtcctcgtcgataataacagaatgtagataatcatttaatccatcgtacatggttggaagatgctcgttgacaaaatctttaattgtcttgatgaaggtgggactatatctaacatcttgattaataaaatttataacattgtccataggatactttgtaactagttttatacacatctcttcatcggtaagtttagacagaatatcgtgaacaggtggtatattatattcatcagatatacgaagaacaatgtccaaatctatattgtttaatatattatatagatgtagtgtagctcctacaggaatatctttaactaagtcaatgatttcatcaaccgttagatctattttaaagttaatcatataggcattgatttttaaaaggtatgtagccttgactacattctcattaattaaccattccaagtcactgtgtgtaagaagattatattctatcataagcttgactacatttggtcccgataccattaaagaattcttatgatataaggaaacagattttaggtactcatctactctacaagaattttggagagccttaacgatatcagtgacgtttattatttcaggaggaaaaaacctaacattgagaatatcggaattaatagcttccagatacagtgattttggcaatagtccgtgtaatccataatccagtaacacgagctggtgcttgctagacaccttttcaatgtttaatttttttgaaataagctttgataaagccttcctcgcaaattccggatacatgaacatgtcggcgacatgattaagtattgttttttcattatttttatattttctcaacaagttctcaataccccaatagatgatagaatatcacccaatgcgtccatgttgtctatttccaacaggtcgctatatccaccaatagaagttttcccaaaaaagattctaggaacagttctaccaccagtaatttgttcaaaatagtcacgcaattcattttcgggtttaaattctttaatatcgacaatttcatacgctcctcttttgaaactaaacttatttagaatatccagtgcatttctacaaaaaggacatgtatacttgacaaaaattgtcactttgttattggccaacctttgttgtacaaattcctcggccattttaatatttaagtgatataaaactatctcgacttatttaactctttagtcgagatatatggacgcagatagctatatgatagccaactacagaaggcaaacgctataaaaaacataattacgacgagcatatttataaatatttttattcagcattacttgatatagtaatattaggcacagtcaaacattcaaccactctcgatacattaactctctcattttctttaacaaattctgcaatatcttcgtaaaaagattcttgaaactttttagaatatctatcgactctagatgaaatagcgttcgtcaacatactatgttttgtatacataaaggcgcccattttaacagtttctagtgacaaaatgctagcgatcctaggatcctttagaatcacatagattgacgattcgtctctcttagtaactctagtaaaataatcatacaatctagtacgcgaaataatattatccttgacttgaggagatctaaacaatctagttttgagaacatcgataagttcatcgggaatgacatacatactatctttaatagaactcttttcatccagttgaatggattcgtccttaaccaactgattaatgagatcttctattttatcattttccagatgatatgtatgtccattaaagttaaattgtgtagcgcttctttttagtctagcagccaatactttaacatcactaatatcgatatacaaaggagatgatttatctatggtattaagaattcgtttttcgacatctgtcaaaaccaattcctttttgcctgtatcatccagttttccatcctttgtaaagaaattattttctactagactattaataagactgataaggattcctccataattgcacaatccaaactttttcacaaaactagactttacaagatctacaggaatgcgtacttcaggtttcttagcttgtgattttttcttttgtggacattttcttgtgaccaactcatctaccatttcattgattttagcagtgaaataagctttcaatgcacgggcactgatactattgaaaacgagttgatcttcaaattccgccatttaagttcaccaaacaacttttaaatacaaatatatcaatagtagtagaataagaactataaaaaaaataataattaaccaataccaaccccaacaaccggtattattagttgatgtgactgttttctcatcacttagaacagatttaacaatttctataaagtctgtcaaatcatcttccggagaccccataaatacaccaaatatagcggcgtacaacttatccatttatacattgaatattggcttttctttatcgctatcttcatcatattcatcatcaatatcaacaagtcccagattacgagccagatcttcttctacattttcagtcattgatacacgttcactatctccagagagtccgataacgttagccaccacttctctatcaatgattagtttcttgagtgcgaatgtaatttttgtttccgttccggatctatagaaaactacaggtgtgataattgccttggccaattgtctttctcttttactgagtgattctagttcaccttctatagatctgagaatggatgattctccagtcgaaacatattctaccatggctccgtttaatttgttgatgaagatggattcatccttaaatgttttctctgtaatagtttccaccgaaagactatgcaaagaatttggaatgcgttccttgtgcttaatgtttccatagacggcttctagaagttgatacaacataggactagccgcggtaacttttatttttagaaagtatccatcgcttctatcttgtttagatttatttttataaagtttagtctctccttccaacataataaaagtggaagtcatttgactagataaactatcagtaagttttatagagatagacgaacaattagcgtattgagaagcatttagtgtaacgtattcgatacattttgcattagatttactaatcgattttgcatactctataacacccgcacaagtctgtagagaatcgctagatgcagtaggtcttggtgaagtttcaactctcttcttgattaccttactcatgattaaacctaaataattgtactttgtaatataatgatatatattttcactttatctcatttgagaataaaaatgtttttgtttaaccactgcatgatgtacagatttcggaatcacaaaccaccggtggttttattttatccttgtccaatgtgaattgaatgggagcggatgcgggtttcgtacgtagatagtacattcccgtttttagaccgagactccatccgtaaaaatgcatactcgttagtttggaataactcggatctgctatatggatattcatagattgactttgatcgatgaaggctcccctgtctgcagccatttttatgatcgtcttttgtggaatttcccaaatagttttataaactcgcttaatatcttctggaaggtttgtattctgaatggatccaccatctgccataatcctattcttgatctcatcattccataattttctctcggttaaaactctaaggagatgcggattaactacttgaaattctccagacaatactctccgagtgtaaatattactggtatacggttccaccgactcattatttcccaaaatttgagcagttgatgcagtcggcataggtgccaccaataaactatttctaagaccgtatgttctgattttatcttttagaggttcccaattccaaagatccgacggtacaacattccaaagatcatattgtagaataccgttactggcgtacgatcctacatatgtatcgtatggtccttccttctcagctagttcacaactcgcctctaatgcaccgtaataaatggtttcgaagatcttcttatttagatcttgtgcttccaggctatcaaatggataatttaagagaataaacgcgtccgctaatccttgaacaccaataccgataggtctatgtctcttattagagatttcagcttctggaataggataataattaatatctataattttattgagatttctgacaattactttgaccacatccttcagtttgagaaaatcaaatcgcccatctattacaaacatgttcaaggcaacagatgccagattacaaacggctacctcattagcatccgcatattgtattatctcagtgcaaagattactacacttgatagttcctaaattttgttgattactctttttgttacacgcatccttataaagaatgaatggagtaccagtttcaatctgagattctataatcgctttccagacgactcgagcctttattatagatttgtatctcctttctctttcgtatagtgtatacaatcgttcgaactcgtctccccaaacattgtccaatccaggacattcatccggacacatcaacgaccactctccgtcatccttcactcgtttcataaagagatcaggaatccaaagagctataaatagatctctggttctatgttcctcgtttcctgtattctttttaagatcgaggaacgccataatatcagaatgccacggttccaagtatatggccataactccaggccgtttgtttcctccctgatctatgtatctagcggtgttattataaactctcaacattggaataataccgtttgatataccattggtaccggagatatagcttccactggcacgaatattactaattgatagacctattccccctgccattttagagattaatgcgcatcgttttaacgtgtcatagataccctctatgctatcatcgatcatgttaagtagaaaacagctagacatttggtgacgactagttcccgcattaaataaggtaggagaagcgtgcgtaaaccatttttcagaaagtagattgtacgtctcaatagctgagtctatatcccattgatgaattcctactgcgacacgcattaacatgtgctgaggtctttcaacgatcttgttgtttattttcaacaagtaggatttttccaaagttttaaaaccaaaatagttgtatgaaaagtctcgttcgtaaataataaccgagttgagtttatccttatatttgttaactatatccatggtgatacttgaaataatcggagaatgtttcccatttttaggattaacatagttgaataaatcctccatcacttcactaaatagtttttttgtttccttgtgtagatttgatacggctattctggcggctagaatggcataatccggatgttgtgtagtacaagtggctgctatttcggctgccagagtgtccaattctaccgttgttactccattatatattccttgaataaccttcatagctattttaataggatctatatgatccgtgtttaagccataacataattttctaatacgagacgtgattttatcaaacatgacattttccttgtatccatttcgtttaatgacaaacatttttgttggtgtaataaaaaaattatttaacttttcattaatagggatttgacgtacgtagcgtacaaaatgattgttcctggtatatagataaagagtcctatatatttgaaaatcgttacggctcgattaaactttaatgattgcatagtgaatatatcattaggatttaactccttgactatcagggcggcaccagaaattaccatcaaaagcattaatacagttatgcctatcgcagttagaacggttatagcatccaccatttatatctaaaaattagatcaaagaatatgtgacaaagtcctagttgtatattgagaattgacaaaacaatgtttcttacatattttttttttattagtaaccgacttaatagtaggaactggaaaactagacttgattattctataagtatagatacccttccaaataatattctctttgataaaagttccagaaaatgtagaattttttaaaaagttatcttttgctattaccaagattgtgtttagacgcttattattaatatgagtgatgaaatccacaccgcctctagatatcgcctttatttccacattagatggtaaatccaatagtgaaactatctttttaggaatgtatggactcgcgtttagaggagtgaacgtcttgggcgtcggaaaggatgattcgtcaaacgaataaacaatttcacaaatggatgttaatgtattagtaggaaattttttgacgctagtggaattgaaaattctaatggatgatgttctacctatttcatccgataacatgttaatttccgacaccaacggttttaatatttcgatgatatacggtagtctctctttcggacttatatagcttattccacaatacgagtcattatatactccaaaaaacaaaataactagtataaaatctgtatcgaatgggaaaaacgaaattatcgacataggtatagaatccggaacattgaacgtattaatacttaattctttttctgtggtaagtaccgataggttattgacattgtatggttttaaatattctataacttgagacttgatagatattagtgatgaattgaaaattatttttatcaccacgtgtgtttcaggatcatcgtcgacgcccgtcaaccaaccgaacggagtaaaataaatatcattaatatatgctctagatattagtatttttatcaatcctttgattatcatcttctcgtaggcgaatgattccatgatcaagagtgatttaagaacatcctccggagtattaatgggcttagtaaacagtccatcgttgcaataataaaagttatccaagttaaaggatattatgcattcgtttaaagatatcacctcatctgacggagacaattttttggtaggttttagagactttgaagctacttgtttaacaaagttattcatcgtcgtttactattctatttaattttgtagttaatttatcacatatcacattaattgactttttggtccatttttccatacgtttatattcttttaatcctgcgttatccgtttccgttatatccagtgatagatcgtgcaggttaaatagaatgctcttaaataatgtcatttttttatccgctaaaaatttaaagaatgtataaacttttttcaaagatttaaaacttttaggtggtgtcctagtacacaatatcataaacaaactaataaacatcccgcattcagattccaacagctgattaacttccacattaatacagcctattttcgctccaaatgtacattcgaaaaatctgaataaaacatcaatgtcgcaatttgtattatccaatacagaatgtttgtgattcgtgttaaaaccatcggagaaggaatagaaataaaaattattatagtggtggaattcagttggaatattgcctccggagtcataaaaggatactaaacattgttttttatcataaattacacatttccaatgagacaaataacaaaatccaaacattacaaatctagaggtagaacttttaattttgtctttaagtatatacgataagatatgtttattcataaacgcgtcaaatttttcatgaatcgctaaggagtttaagaatctcatgtcaaattgtcctatataatccacttcggatccataagcaaactgagagactaagttcttaatacttcgattgctcatccaggctcctctctcaggctctattttcatcttgacgacctttggattttcaccagtatgtattcctttacgtgataaatcatcgattttcaaatccatttgtgagaagtctatcgccttagatactttttcccgtagtcgaggtttaaagaaatacgctaacggtatactagtaggtaactcaaaaacatcatatatagaatggtaacgcgtctttaactcgtcggttaactctttcttttgatcgagttcgtcgctactattgggtctgctcaggtgccccgactctactagttccaacatcataccgataggaatacaagacactttgccggcggttgtagatttatcatatttttccactacatatccgttacaatttgttaaaaatttagatacatctatattgctacataatccagctagtgaatatatatgacataataaattggtaaatcctagttctggtattttactaattactaaatctgtatatctttccatttatcatggaaaagaatttaccagatatcttcttttttccaaactgcgttaatgtattctcttacaaatattcacaagatgaattcagtaatatgagtaaaacggaacgtgatagtttctcattggccgtgtttccagttataaaacatagatggcataacgcacacgttgtaaaacataaaggaatatacaaagttagtacagaagcacgtggaaaaaaagtatctcctccatcactaggaaaacccgcacacataaacctaaccgcgaagcaatatatatacagtgaacacacaataagctttgaatgttatagttttctaaaatgtataacaaatacagaaatcaattcgttcgatgagtatatattaagaggactattagaagctggtaatagtttacagatattttccaattccgtaggtaaacgaacagatactataggtgtactagggaataagtatccatttagcaaaattccattggcctcattaactcctaaagcacaacgagagatattttcagcgtggatttctcatagacctgtagttttaactggaggaactggagtgggtaagacgtcacaggtacccaagttattgctttggtttaattatttatttggtggattctctactctagataaaatcactaactttcacgaaagaccagtcattctatctcttcctaggatagctttagttagattgcatagcaataccattttaaaatcattgggatttaaggtactagatggatctcctatttctttacggtacggatctataccggaagaattaataaacaaacaaccaaaaaaatatggaattgtattttctacccataagttatctctaacaaaactatttagttatggcactcttattatagacgaagttcatgagcatgatcaaataggagatattattatagcagtagcgagaaagcatcatacgaaaatagattctatgtttttaatgactgccacgttagaggatgaccgagaacggctaaaagtatttttacctaatcccgcatttatacatattcctggagatacactgtttaaaattagcgaggtatttattcataataagataaatccatcttccagaatggcatacatagaagaagaaaagagaaatttagttactgctatacagatgtatactcctcctgatggatcatccggtatagtctttgtggcatccgttgcacagtgtcacgaatataaatcatatttagaaaaaagattaccgtatgatatgtatattattcatggtaaggtcttagatatagacgaaatattagaaaaagtgtattcatcacctaatgtatcgataattatttctactccttatttggaatccagcgttactatacgcaatgttacacacatttatgatatgggtaaagtttttgtccccgctccttttggaggatcgcaagaatttatttctaaatctatgagagatcaacgaaaaggaagagtaggaagagttaatcctggtacatacgtctatttctatgatctgtcttatatgaagtctatacagcgaatagattcagaatttctacataattatatattgtacgctaataagtttaatctaacactccccgaagatttgtttataatccctacaaatttggatattctatggcgtacaaaggaatatatagactcgttcgatattagtacagaaacatggaataaattattatccaattattatatgaagatgatagagtatgctaaactttatgtactaagtcctattctcgctgaggagttggataactttgagaggacgggagaattaactagtattgtacgagaagccattttatctctaaatttacgaattaagattttaaattttaaacataaagatgatgatacgtatatacacttttgtaaaatattattcggtgtctataacggaacaaacgctactatatattatcatagacctctaacgggatatatgaatatgatttcagatactatatttgttcctgtagataataactaaaaatcaaactctaatgaccacatctttttttagagatgaaaaattttctacatctccttttgtagacacgactaaacattttgcaaaaaaaagtttattagtgtttagataatcgtatacttcatcagtgtagatagtaaatgtgaacaaataaaaggtattcttactcaatagattggtaaattccatagaatatattaatcctttcttcttgagatcccacatcatttcaaccagagacgttttatccaatgatttacctcgtactataccacatacaaaactagattttgcagtgacgtcgtacctggtattcctaccaaacaaaattttacttttagttcttttagaaaattctaaggtagaatctctatttgccaatatgtcatctatggaattaccactagcaaaaaatgatagaaatatatattgatacatcgcagctggttttgatctactatactttaaaaacgaatcagattccataattgcctgtatatcatcagctgaaaaactatgttttacacgtattccttcggcatttctttttaatgatatatcttgtttagacaatgataaagttatcatgtccatgagagacgcgtctccgtatcgtataaatatttcattagatgttagacgcttcattaggggtatacttctataaggtttcttaatcagtccatcattggttgcgtcaagaactactatcggatgttgttgggtatctctagtgttacacatggccttactaaagtttgggtaaataactatgatatctctattaattatagatgcatatatttcattcgtcaaggatattagtatcgacttgctatcgtcattaatacgtgtaatgtaatcatataaatcatgcgatagccaaggaaaattcaaatagatgttcatcatataatcgtcgctataattcatattaatacgttgacattgactaatttgtaatatagcctcgccacgaagaaagctctcgtattcagtttcatcgataaaggataccgttaaatataactggttgccgatagtctcatagtctattaagtggtaagtttcgtacaaatacagaatccctaaaatattatctaatgttggattaatctttaccataactgtataaaatggagacggagtcataactattttaccgtttgtacttactggaatagacgaaggaataatctccggacatgctggtaaagacccaaatgtctgtttgaagaaatccaatgttccaggtcctaatctcttaacaaaaattacgatattcgatcccgatatcctttgcattctatttaccagcatatcacgaactatattaagattatctatcatgtctattctcccaccgttatataaatcgcctccgctaagaaacgttagtatatccatacaatggaatacttcatttctaaaatagtattcgttttctaattctttaatgtgaaatcgtatactagaaagggaaaaattatctttgagttttccgttagaaaagaaccacgaaactaatgttctgattgcgtccgattccgttgctgaattaatggatttacaccaaaaactcatataacttctagatgtagaagcattcgctaaaaaattagtagaatcaaaggatataagtagatgttccaacaagtgagcaattcccaagatttcatctatatcattctcgaatccgaaattagaaattcccaagtagatatcctttttcatccgatcgttgatgaaaatacgaactttattcggtaagacaatcatttactaaggagtaaaataggaagtaatgttcgtatgtcgttatcatcgtataaattaaaggtgtgttttttaccattaagtgacattataattttaccaatattggaattataatataggtgtatttgcgcactcgcgacggttgatgcatcggtaaatatagctgtatctaatgttctagtcggtatttcatcatttcgctgtctaataatagcgttttctctatctgtttccattacagctgcctgaagtttattggtcggataatatgtaaaataataagaaatacatacgaataacaaaaataaaataagatataataaagatgccatttagagatctaattttgttcaacttgtccaaattcctacttacagaagatgaggaatcgttggagatagtgtcttccttatgtagaggatttgaaatatcttatgatgacttgataacttactttccagataggaaataccataaatatatttctaaagtatttgaacatgtagatttatcggaggaattaagtatggaattccatgatacaactttgcgagatttagtctatcttagattgtacaagtattccaagtgtatacggccgtgttataaattaggagataatctaaaaggcatagttgttataaaggacaggaatatttatattagggaagcaaatgatgacttgatagaatatctcctcaaggaatacactcctcagatttatacatattctaatgagcgcgtccccataactggttcaaaattaattctttgtggattttctcaagttacatttatggcgtatacaacgtcgcatataacaacaaataaaaaggtagatgttctcgtttccaaaaaatgtatagatgaactagtcgatccaataaattatcaaatacttcaaaatttatttgataaaggaagcggaacaataaacaaaatactcaggaagatattttattcggtaacaggtggccaaactccataggtagctttttctatttcggattttagaatttccaaattcaccagcgatttatctgttttggtgaaatccaaggatttattaatgtccacaaatgccatttgttttgtctgtggattgtatttgaaaatggaaacgatgtagttagatagatgcgctgcgaagtttcctattagggttccgcgcttcacgtcacccagcatacttgaatcaccatcctttaaaaaaaatgataagatatcaacatggagtatatcatactcggattttaattcttctactgcatcactgacattttcacaaatactacaatacggtttaccgaaaataatcagtacgttcttcatttatgggtatcaaaaacttaaaatcgttactgctggaaaataaatcactgacgatattagatgataatttatacaaagtatacaatggaatatttgtggatacaatgagtatttatatagccgtcgccaattgtgtcagaaacttagaagagttaactacggtattcataaaatacgtaaacggatgggtaaaaaagggagggcatgtaaccctttttatcgatagaggaagtataaaaattaaacaagacgttagagacaagagacgtaaatattctaaattaaccaaggacagaaaaatgctagaattagaaaagtgtacatccgaaatacaaaatgttaccggatttatggaagaagaaataaaggcagaaatgcaattaaaaatcgataaactcacatttcaaatatatttatctgattctgataacataaaaatatcattgaatgagatactaacacatttcaacaataatgagaatgttacattattttattgtgatgaacgagacgcagaattcgttatgtgtctcgaggctaaaacacatttctctaccacaggagaatggccgttgataataagtaccgatcaggatactatgctatttgcatctgctgataatcatcctaagatgataaaaaacttaactcaactgtttaaatatgttccatctgcagaggataactatttagcaaaattaacggcgttagtgaatggatgtgatttctttcctggactctatggggcatctataacacccaacaacttaaacaaaatacaattgtttagtgattttacaatcgataatatagtcactagtttggcaattaaaaattattatagaaagactaactctaccgtagacgtgcgtaatattgttacgtttataaacgattacgctaatttagacgatgtctactcgtatattcctccttgtcaatgcactgttcaagaatttatattttccgcattagatgaaaaatggaatgaatttaaatcatcttatttagaaagcgtgccgttaccctgccaattaatgtatgcgttagaaccacgcaaggagattgatgtttcagaagttaaaactttatcatcttatatagatttcgaaaatactaaatcagatatcgatgttataaaatctatatcctcgatcttcggatattctaacgaaaactgtaacacgatagtattcggcatctataaggataatttactactgagtataaatagttcattttactttaacgatagtctgttaataaccaatactaaaagtgataatataataaatataggttactagattaaaaatggtgttccaactcgtgtgctctacgtgcggcaaagatatttctcacgaacgatataaattgattatacgaaaaaaatcattaaaggatgtactcgtcagtgtaaagaacgaatgttgtaggttaaaattatctacacaaatagaacctcaacgtaacttaacagtgcaacctctattggatataaactaatatggatccggttaattttatcaagacatatgcgcctagaggttctattatttttattaattataccatgtcattaacaagtcatttgaatccatcgatagaaaaacatgtgggtatttattatggtacgttattatcggaacacttggtagttgaatcaacatatagaaaaggagttcgaatagtcccattggatagtttttttgaaggatatcttagtgcaaaagtatacatgttagagaatattcaagttatgaaaatagcagctgatacgtcattaactttattgggtattccgtatggatttggtcatgatagaatgtattgttttaaattggtagctgactgttataaaaatgccggtattgatacatcgtctaaacgaatattaggtaaagatatttttctgagccaaaacttcacagacgataatagatggataaagatatatgattctaataatttaacattttggcaaattgattaccttaaagggtgagttaatatgcataactactcctccgttgttttttccctcgttctttttcttaacgttgtttgccatcactctcataatgtaaagatattctaaaatggtaaacttttgcatatcggacgcagaaattggtataaatgttgtaattgtattatttcccgtcaatggactagtcacagctccatcagttttatatcctttagagtatttctcactcgtgtctaacattctagagcattccatgatctgtttatcgttgatattggccggaaagatagattttttattttttattatattactattggcaattgtagatataacttctggtaaatatttttctaccttttcaatctcttctattttcaagccggctatatattctgctatattgttgctagtatcaataccttttctggctaagaagtcatatgtggtattcactatatcagttttaactggtagttccattagcctttccacttctgcagaataatcagaaattggttctttaccagaaaatccagctactataataggctcaccgatgatcattggcaaaatcctatattgtaccagattaatgagagcatatttcatttccaataattctgctagttcttgagacattgatttatttgatgaatctagttggttctctagatactctaccatttctgccgcatacaataacttgttagataaaatcagggttatcaaagtgtttagcgtggctagaatagtgggcttgcatgtattaaagaatgcggtagtatgagtaaaccgttttaacgaattatatagtctccagaaatctgtggcgttacatacatgagccgaatgacatcgaagattgtccaatatttttaatagctgctctttgtccattatttctatatttgactcgcaacaattgtagataccattaatcaccgattcctttttcgatgccggacaatagcacaattgtttagctttggactctatgtattcagaattaatagatatatctcttaatacagattgcactatacattttgaaactatgtcaaaaattgtagaacgacgctgttctgcagccatttaactttaaataatttacaaaaatttaaaatgagcatccgtataaaaatcgataaactgcgccaaattgtggcatatttttcagagttcagtgaagaagtatctataaatgtagactcgacggatgagttaatgtatatttttgccgccttgggcggatctgtaaacatttgggccattatacctctcagtgcatcagtgttctaccgcggagccgaaaatattgtgtttaatcttcctgtgtccaaggtaaaatcgtgtttgtgtagttttcacaatgatgccatcatagatatagaacctgatctggaaaataatctagtaaaactttctagttatcatgtagtaagtgtcgattgtaataaggaactgatgcctattaggacagatactactatttgtctaagtatagatcaaaagaaatcttacgtgtttaattttcacaagtatgaagaaaaatgttgtggtagaaccgtcattcatttagaatggttgttgggctttatcaagtgtattagtcagcatcagcatttggctattatgtttaaagatgacaatattattatgaagactcctggtaatactgatgcattttccagggaatattctatgactgaatgttctcaagaactacaaaagttttctttcaaaatagctatctcgtctctcaacaaactacgaggattcaaaaagagagtcaatgtttttgaaactagaatcgtaatggataatgacgataacattttaggaatgttgttttcggatagagttcaatcctttaagatcaacatctttatggcgtttttagattaatactttcaatgagataaatatgggtggcggagtaagtgttgagctccctaaacgggatccgcctccgggagtacccactgatgagatgttattaaacgtggataaaatgcatgacgtgatagctcccgctaagcttttagaatatgtgcatataggaccactagcaaaagataaagaggataaagtaaagaaaagatatccagagtttagattagtcaacacaggacccggtggtctttcggcattgttaagacaatcgtataatggaaccgcacccaattgctgtcgcacttttaatcgtactcattattggaagaaggatggaaagatatcagataagtatgaagagggtgcagtattagaatcgtgttggccagacgttcacgacaccggaaaatgcgatgttgatttattcgactggtgtcagggggatacgttcgatagaaacatatgccatcagtggatcggttcagcctttaataggagtaatagaactgtagagggtcaacaatcgttaataaatctgtataataagatgcaaacattatgtagtaaagatgctagtgtaccaatatgtgaatcatttttgcatcatttacgcgcacacaatacagaagatagcaaagagatgatcgattatattctaagacaacagtctgcggactttaaacagaaatatatgagatgtagttatcccactagagataagttagaagagtcattaaaatatgcggaacctcgagaatgttgggatccagagtgttcgaatgccaatgttaatttcttgctaacacgtaattataataatttaggactttgcaatattgtacgatgtaatactagcgtgaacaacttacagatggataaaacttcctcattaagattgtcatgtggattaagcaatagtgatagattttctactgttcccgtcaatagagcaaaagtagttcaacataatattaaacactcgttcgacctaaaattgcatttgatcagtttattatctctcttggtaatatggatactaattgtagctatttaaatgggtgccgcggcaagcatacagacgacggtgaatacactcagcgaacgtatctcgtctaaattagaacaagaagcgaatgctagtgctcaaacaaaatgtgatatagaaatcggaaatttttatatccgacaaaaccatggatgtaacctcactgttaaaaatatgtgctctgcggacgcggatgctcagttggatgctgtgttatcagccgctacagaaacatatagtggattaacaccggaacaaaaagcatacgtgccagctatgtttactgctgcgttaaacattcagacgagtgtaaacactgttgttagagattttgaaaattatgtgaaacagacttgtaattctagcgcggtcgtcgataacaaattaaagatacaaaacgtaatcatagatgaatgttacggagccccaggatctccaacaaatttggaatttattaatacaggatctagcaaaggaaattgtgccattaaggcgttgatgcaattgacgactaaggccactactcaaatagcacctaaacaagttgctggtacaggagttcagttttatatgattgttatcggtgttataatattggcagcgttgtttatgtactatgccaagcgtatgttgttcacatccaccaatgataaaatcaaacttattttagccaataaggaaaacgtccattggactacttacatggacacattctttagaacttctccgatggttattgctaccacggatatgcaaaactgaaaatatattgataatattttaatagattaacatggaagttatcactgatcgtctagacgatatagtgaaacaaaatatagcggatgaaaaatttgtagattttgttatacacggtctagagcatcaatgtcctgctatacttcgaccattaattaggttgtttattgatatactattatttgttatagtaatttatatttttacggtacgtctagtaagtagaaattatcaaatgttgttggcgttggtggcgctagtcatcacattaactattttttattactttatactataatagtactagactgacttctaacaaacatctcacctgccataaataaatgcttgatattaaagtcttctatttctaacactattccatctgtggaaaataatactctgacattatcgctaattgacacatcggtgagtgatatgcctataaagtaataatcttctttgggcacatataccagtgtaccaggttctaacaacctatttactggtgctcctatagcatactttttctttaccttgagaatatccatcgtttgcttggtcaatagcgatatgtgattttttatcaaccactcgaaaaagtaattggagtgttcatatcctctacgggctattgtctcatggccgtgtatgaaatttaagtaacacgactgtggtagatttgttctatagagccggttgccgcaaatagatagaactaccaatatgtctgtacaaatgttaaacattaattgattaacagaaaaaacaatgttcgttctgggaatagaaaccagatcaaaacaaaattcgttagaatatatgccacgtttatacattgaatataaaataactacagtttgaaaaataacagtatcatttaaacatttaacttgcggggttaatctcacaactttactgtttttgaactgttcaaaatatagcatagatccgtgagaaatacgtttagccgcctttaatagaggaaatcccaccgcctttctggatctcaccaacgacgatagttctgaccagcaactcatttcttcatcatccacctgttttaacatataataggcaggagatagatatccgtcattgcaatattccttctcgtaggcacacaatctaatattgataaaatctccattctcttctctgcatttattatcttgtttcggtggctgattaggctgtagtcttggtttaggctttggtatatcgttgttgaatctattttggtcattaaatctttcatttcttcctggtatatttttatcacctcgtttggttggatttttgtctatattatcgtttgtaacatcggtacgggtattcatttatcacaaaaaaaacttctctaaatgagtctactgctagaaaacctcatcgaagaagataccatattttttgcaggaagtatatctgagtatgatgatttacaaatggttattgccggcgcaaaatccaaatttccaagatctatgctttctatttttaatatagtacctagaacgatgtcaaaatatgagttggagttgattcataacgaaaatatcacaggagcaatgtttaccacaatgtataatataagaaacaatttgggtctaggagatgataaactaactattgaagccattgaaaactatttcttggatcctaacaatgaagttatgcctcttattattaataatacggatatgactgccgtcattcctaaaaaaagtggtaggagaaagaataagaacatggttatcttccgtcaaggatcatcacctatcttgtgtattttcgaaactcgtaaaaagattaatatttataaagaaaatatggaatccgcgtcgactgagtatacacctatcggagacaacaaggctttgatatctaaatatgcgggaattaatatcctaaatgtgtattctccttccacatccataagattgaatgccatttacggattcaccaataaaaataaactagagaaacttagtactaataaggaactagaatcgtatagttctagccctcttcaagaacccattaggttaaatgattttctgggactattggaatgtgttaaaaagaatattcctctaacagatattccgacaaaggattgattactataaatggagaatgttcctaatgtatactttaatcctgtgtttatagagcccacgtttaaacattctttattaagtgtttataaacacagattaatagttttatttgaagtattcgttgtattcattctaatatatgtattttttagatctgaattaaatatgttcttcatgcctaaacgaaaaatacccgatcctattgatagattacgacgtgctaatctagcgtgtgaagacgataaattaatgatctatggattaccatggatgacaactcaaacatctgcgttatcaataaatagtaaaccgatagtgtataaagattgtgcaaagcttttgcgatcaataaatggatcacaaccagtatctcttaacgatgttcttcgcagatgatgattcattttttaagtatttggctagtcaagatgatgaatcttcattatctgatatattgcaaatcactcaatatctagactttctgttattattattgatccaatcaaaaaataaattagaagccgtgggtcattgttatgaatctctttcagaggaatacagacaattgacaaaattcacagactttcaagattttaaaaaactgtttaacaaggtccctattgttacagatggaagggtcaaacttaataaaggatatttgttcgactttgtgattagtttgatgcgattcaaaaaagaatcctctctagctaccaccgcaatagatcctgttagatacatagatcctcgtcgcaatatcgcattttctaacgtgatggatatattaaagtcgaataaagtgaacaataattaattctttattgtcatcatgaacggcggacatattcagttgataatcggccccatgttttcaggtaaaagtacagaattaattagacgagttagacgttatcaaatagctcaatataaatgcgtgactataaaatattctaacgataatagatacggaacgggactatggacgcatgataagaataattttgaagcattggaagcaactaaactatgtgatgtcttggaatcaattacagatttctccgtgataggtatcgatgaaggacagttctttccagacattgttgaattctgtgagcgtatggcaaacgaaggaaaaatagttatagtagccgcactcgatgggacatttcaacgtaaaccgtttaataatattttgaatcttattccattatctgaaatggtggtaaaactaactgctgtgtgtatgaaatgctttaaggaggcttccttttctaaacgattgggtgaggaaaccgagatagaaataataggaggtaatgatatgtatcaatcggtgtgtagaaagtgttacatcgactcataatattatattttttatctaaaaaactaaaaataaacattgattaaattttaatataatacttaaaaatggatgttgtgtcgttagataaaccgtttatgtattttgaggaaattgataatgagttagattacgaaccagaaagtgcaaatgaggtcgcaaaaaaactgccgtatcaaggacagttaaaactattactaggagaattattttttcttagtaagttacagcgacacggtatattagatggtgccaccgtagtgtatataggatctgctcccggtacacatatacgttatttgagagatcatttctataatttaggagtgatcatcaaatggatgctaattgacggccgccatcatgatcctattttaaatggattgcgtgatgtgactctagtgactcggttcgttgatgaggaatatctacgatccatcaaaaaacaactgcatccttctaagattattttaatttctgatgtgagatccaaacgaggaggaaatgaacctagtacggcggatttactaagtaattacgctctacaaaatgtcatgattagtattttaaaccccgtggcgtctagtcttaaatggagatgcccgtttccagatcaatggatcaaggacttttatatcccacacggtaataaaatgttacaaccttttgctccttcatattcagctgaaatgagattattaagtatttataccggtgagaacatgagactgactcgagttaccaaatcagacgctgtaaattatgaaaaaaagatgtactaccttaataagatcgtccgtaacaaagtagttgttaactttgattatcctaatcaggaatatgactattttcacatgtactttatgctgaggaccgtgtactgcaataaaacatttcctactactaaagcaaaggtactatttctacaacaatctatatttcgtttcttaaatattccaacaacatcaactgaaaaagttagtcatgaaccaatacaacgtaaaatatctagcaaaaattctatgtctaaaaacagaaatagcaagagatccgtacgcagtaataaatagaaacgtactactgagatatactaccgatatagagtataatgatttagttactttaataaccgttagacataaaattgattctatgaaaactgtgtttcaggtatttaacgaatcatccataaattatactccggttgatgatgattatggagaaccaatcattataacatcgtatcttcaaaaaggtcataacaagtttcctgtaaattttctatacatagatgtggtaatatctgacttatttcctagctttgttagactagatactacagaaactaatatagttaatagtgtactacaaacaggcgatggtaaaaagactcttcgtcttcccaaaatgttagagacggaaatagttgtcaagattctctatcgccctaatataccattaaaaattgttagatttttccgcaataacatggtaactggagtagagatagccgatagatctgttatttcagtcgctgattaatcaattagtagagatgagataagaacattataataatcaataatatatcttatatctcgtttagaaaaatgctaatattaaaatagctaacgctagtaatccaatcggaagccatttgatatctataatagggtatctaatttcctgattcagatagcggacagctatattctcggtagctactcgtttggaatcacaaacattatttacatctaatttactatctgtaatggaaacgtttcccaatgaaatggtacaatccgatacattgcattttgttatatttttttttaaagaggctggtaacaacgcatcgcttcgtttacatggctcgtaccaacaataatagggtaatcttgtatctattcctatccgtactatgcttttatcaggataaatacatttacatcgtatatcgtctttgttagcatcacagaatgcataaatttgttcgtccgtcatgataaaaatttaaagtgtaaatataactattatttttatagttgtaataaaaagggaaatttgattgtataccttcggttctttaaaagaaactgacttgataaaaatggctgtaatctctaaggttacgtatagtctatatgatcaaaaagagattaatgctacagatattatcattagtcatgttaaaaatgacgacgatatcggtaccgttaaagatggtagactaggtgctatggatggggcattatgtaagacttgtgggaaaacggaattggaatgtttcggtcactggggtaaagtaagtatttataaaactcatatagttaagcctgaatttatttcagaaattattcgtttactgaatcatatatgtattcactgcggattattgcgttcacgagaaccgtattccgacgatattaacctaaaagagttatcgggacacgctcttaggagattaaaggataaaatattatccaagaaaaagtcatgttggaacagtgaatgtatgcaaccgtatcaaaaaattactttttcaaagaaaaaggtttgtttcgtcaacaagttggatgatattaacgttcctaattctctcatctatcaaaagttaatttctattcatgaaaagttttggccattattagaaattcatcaatatccagctaacttattttatacagactactttcccatccctccgttgattattagaccggctattagtttttggatagatagtatacccaaagaaaccaatgaattaacttacttattaggtatgatcgttaagaattgtaacttgaatgctgatgaacaggttatccagaaggcggtaatagaatacgatgatattaaaattatttctaataacacttccagtatcaatttatcatatattacatccggcaaaaataatatgattagaagttatatcgtcgcccgacgaaaagatcagacggctagatctgtaattggtcccagtacatctatcaccgttaatgaggtaggaatgcccgcatatattagaaatacacttacagaaaagatatttgttaatgcctttacagtggataaagttaaacaactattagcatcaaaccaagttaaattttactttaataaacgattaaaccaattaacaagaatacgccaaggaaagtttatcaaaaataaaatacatttattgcctggtgattgggtagaagtagctgttcaagaatatacaagtattatttttggaagacagccgtctctacatagatacaacgtcatcgcttcatctatcagagctaccgaaggagatactatcaaaatatctcccggaattgccaactctcaaaatgctgatttcgacggagatgaagaatggatgatattagaacaaaatcctaaagctgtaattgaacaaagtattcttatgtatccgacgacgttactcaaacacgatattcatggagcccccgtttatggatctattcaagatgaaatcgtagcagcgtattcattgtttaggatacaagatctttgtttagatgaagtattgaacatcttggggaaatatggaagagagttcgatcctaaaggtaaatgtaaattcagcggtaaagatatctatacttacttgataggtgaaaagattaattatccgggtctcttaaaggatggtgaaattattgcaaacgacgtagatagtaattttgttgtggctatgaggcatctgtcattggctggactcttatccgatcataagtcgaacgtggaaggtatcaactttattatcaagtcatcttatgtttttaagagatatctatctatttacggttttggggtgacattcaaagatctgagaccaaattcgacgttcactaataaattggaggccatcaacgtagaaaaaatagaacttatcaaagaagcatacgccaaatatctcaacgatgtaagagacgggaaaatagttccattatctaaagctttagaggcggactatgtggaatccatgttatccaacttgacaaatcttaatatccgagagatagaagaacatatgagacaaacgctgatagatgatccagataataacctcctgaaaatggccaaagcgggttataaagtaaatcctacagaactaatgtatattctaggtacgtatggacaacaaaggattgatggtgaaccagcagagactcgagtattgggtagagtcttaccttactatcttccagactctaaggatccagaaggaagaggttacattcttaattctttaacaaaaggattaacaggttctcaatattacttttcgatgctggttgcaagatctcaatctactgatatcgtctgtgaaacatcacgtaccggaacactggctagaaaaatcattaaaaagatggaggatatggtggtcgacggatacggacaagtagttataggtaatacgctcatcaagtacgccgccaattataccaaaattctaggctcagtatgtaaacctgtagatcttatctatccagatgagtccatgacttggtatttggaaattagtgctctgtggaataaaataaaacagggattcgtttactctcagaaacagaaacttgcaaagaagacattggcgccgtttaatttcctagtattcgtcaaacccaccactgaggataatgctattaaggttaaggatctgtacgatatgattcataacgtcattgatgatgtgagagagaaatacttctttacggtatctaatatagattttatggagtatatattcttgacgcatcttaatccttctagaattagaattacaaaagaaacggctatcactatctttgaaaagttctatgaaaaactcaattatactctaggtggtggaactcctattggaattatttctgcacaggtattgtctgagaagtttacacaacaagccctgtccagttttcacactactgaaaaaagtggtgccgtcaaacaaaaacttggtttcaacgagtttaataacttgactaatttgagtaagaataagaccgaaattatcactctggtatccgatgatatctctaaacttcaatctgttaagattaatttcgaatttgtatgtttgggagaattaaatccagacatcactcttcgaaaagaaacagataggtatgtagtagatataatagtcaatagattatacatcaagagagcagaaattaccgaattagtcgtcgaatatatgattgaacgattcatctcctttagcgtcattgtaaaggaatggggtatggaaacattcattgaggacgaggataatattagatttactgtctatctaaatttcgttgaaccagaggaattgaatcttagtaagtttatgatggttcttccgggggcagccaacaagggaaagattagtaaattcaagattcctatctctgattatacgggttatgacgacttcaatcaaacaaaaaagctcaataagatgactgtagaactcatgaatctaaaagaattaggttctttcgatttggaaaacgtcaacgtgtatcctggagtatggaatacatacgatatcttcggtatcgaggccgctcgtgaatacttgtgcgaagccatgttaaacacctatggagaagggttcgattatctgtatcagccttgtgatcttctcgctagtttactatgtgctagttacgaaccagaatcagtgaataaattcaagttcggcgcagctagtactcttaagagagctacgttcggagacaataaagcattgttaaacgcggctcttcataaaaagtcagaacctattaacgataatagtagctgccacttttttagcaaggtccctaatataggaactggatattacaaatactttatcgacttgggtcttctcatgagaatggaaaggaaactatctgataagatatcttctcaaaagatcaaggaaatggaagaaacagaagacttttaattcttatcaataacatatttttctatgatctgtcttttaaacgatggattttccacaaatgcgcctctcaagtccctcatagaatgatacacgtataaaaaatatagcataggcaatgactccttatttttagacattagatatgccaaaatcatagccccgcttctatttactcccgcagcacaatgaaccaacacgggctcgtttcgttgatcacatttagataaaaaggcggttacgtcgtcaaaatatttactaatatcggtagttgtatcatctaccaacggtatatgaataatattaatattagagttaggtaatgtatatttatccatcgtcaaatttaaaacatatttgaacttaacttcagatgatggtgcatccatagcatttttataatttcccaaatacacattattggttacccttgtcattatagtgggagatttggctctgtgcatatctccagttgaacgtagtagtaagtatttatacaaacttttcttatccatttataacgtacaaatggataaaactactttatcggtaaacgcgtgtaatttagaatacgttagagaaaaggctatagtaggcgtacaagcagccaaaacatcaacacttatattctttgttattatattggcaattagtgcgctattactctggtttcagacgtctgataatccagtctttaatgaattaacgagatatatgcgaattaaaaatacggttaacgattggaaatcattaacggatagcaaaacaaaattagaaagtgatagaggtagacttctagccgctggtaaggatgatatattcgaattcaaatgtgtggatttcggcgcctattttatagctatgcgattggataagaaaacatatctgccgcaagctattaggcgaggtactggagacgcgtggatggttaaaaaggcggcaaaggtcgatccatctgctcaacaattttgtcagtatttgataaaacacaagtctaataatgttattacttgtggtaatgagatgttaaatgaattaggttatagcggttattttatgtcaccgcattggtgttccgattttagtaatatggaatagtgttagataaatgcggtaacgaatgttcctgtaaggaaccataacagtttagatttaacgttaaagatgagcataaacataataaacaaaattacaatcaaacctataacattaatatcaaacaatccaaaaaatgaaatcagtggagtagtaaacgcgtacataactcctggataacgtttagtagctgccgttcctattctagaccaaaaattcggtttcatgttttcgaaacggtgttctgcaacaagtcggggatcgtgttctacatatttggcggcattatccagtatctgcctattgatcttcatttcgttttcaattctggctatttcaaaataaaatcccgatgatagacctccagactttataatttcatctacgatgttcagcgccgtagtaactctaataatataggctgataagctaacatcataccctcctgtatatgtgaatatggcatgatttttgtccattacaagctcggttttaactttattgcctgtaataatttctctcatctgtaggatatctatttttttgtcatgcattgccttcaagacgggacgaagaaacgtaatatcctcaataacgttatcgttttctacaataactacatattctacctttttattttctaactcggtaaaaaaattagaatcccatagggctaaatgtctagcgatatttcttttcgtttcctctgtacacatagtgttacaaaaccctgaaaagaagtgagtatacttgtcatcatttctaatgtttcctccagtccactgtataaacgcataatccttgtaatgatctggatcatccttgactaccacaacatttcttttttctggcataacttcgttgtcctttacatcatcgaacttctgatcattaatatgctcatgaacattaggaaatgtttctgatggaagtctatcaataactggcacaacaataacaggagttttcgccgccgccatttagttattgaaattaatcatatacaactctttaatacgagttatattttcgtctatccattgtttcacatttacatatttcgacaaaaagatataaaatgcgtattccaatgcttctctgtttaatgaattactaaaatatacaaacacgtcactgtctggcaataaatgatatcttagaatattgtaacaatttattttgtattgcacatgttcgtgatctatgagttcttcttcgaatggcataggatctccgaatctgaaaacgtataaataggagttagaataataatatttgagagtattggtaatatataaactctttagcggtataattagtttttttctctcaatttctatttttagatgtgatggaaaaatgactaattttgtagcattagtatcatgaactctaatcaaaatcttaatatcttcgtcacacgttagctctttgaagtttttaagagatgcatcagttggttcgaccgatggagtaggtgcaacaattttttgttcgatgtatgtatgtactggagccattgttttaactataatggtgcttgtatcgaaaaactttaatgcagatagcggaagctcttcgccgcgactttctacatcgtaattgggttctaacgccgatctctgaatggatactagttttctaagttctaatgtgattctctgaaaatgtaaatccaattcctccggcattatagatgtgtatacatcggtaaataaaactatagtatccaacgatcccttctcgcaaattctagtcttaaccaaaaaatcgtatataaccacggagatggcgtatttaagagtggattcttctaccgttttgttcttggatgtcatataggaaactataaagtccgcactactgttaagaatgattactaacgcaactatatagttcaaattaagcattttggaaacataaaataactctgtagacgatacttgactttcgaataagtttgcagacaaacgaagaaagaacagacctctcttaatttcagaagaaaactttttttcgtattcctgacgtctagagtttatatcaataagaaagttaagaattagtcggttaatgttgtatttcattacccaagtttgagatttcataatattatcaaaagacatgataatattaaagataaagcgctgactatgaacgaaatagctatatggttcgctcaaaaatatagtcttgttaaacgtggaaacgataactgtatttttaatcacgtcagcggcatctaaattaaatataggtatatttattccacacactctacaatatgccacaccatcttcataataaataaattcgttagcaaaattattaattttagtgaaatagttagcgtcaactttcatagcttccttcaatctaatttgatgctcacacggtgcgaattccactctaacatcccttttccatgcctcaggttcatcgatctctataatatctagttttttgcgtttcacaaacacaggctcgtctctcgcgatgagatctgtatagtaactatgtaaatgataactagatagaaagatgtagctatatagatgacgatcctttaagagaggtataataactttaccccaatcagatagactgttgttatggtcttcggaaaaagaatttttataaatttttccagtattttccaaatatacgtacttaacatctaaaaaatccttaatgataataggaatggataatccgtctattttataaagaaatacatatcgcacattatacttttttttggaaatgggaataccgatgtgtctacataaatatgcaaagtctaaatattttttagagaatcttaattggtccaaattcttttccaagtacggtaatagatttttcatattgaacggtatcttcttaatctctggttctagttccgcattaaatgatgaaactaagtcactatttttataactaacgattacatcacctctaacatcatcatttaccagaatactgatcttcttttgtcgtaaatacatgtctaatgtgttaaaaaaaagatcatacaagttatacgtcatttcatctgtggtattcttgtcattgaaggataaactcgtactaatctcttctttaacagcctgttcaaatttatatcctatatacgaaaaaatagcaaccagtgtttgatcatccgcgtcaatattctgttctatcgtagtgtataacaatcgtatatcttcttctgtgatagtcgatacgttataaaggttgataacgaaaatatttttatttcgtgaaataaagtcatcgtaggattttggacttatattcgcgtctagtagatatgcttttatttttggaatgatctcaattagaatagtctctttagagtccatttaaagttacaaacaactaggaaattggtttatgatgtataatttttttagtttttatagattctttattctatacttaaaaaatgaaaataaatacaaaggttcttgagggttgtgttaaattgaaagcgagaaataatcataaattatttcattatcgcgatatccgttaagtttgtatcgtaatggcgtggtcaattacaaataaagcggatactagtagcttcacaaagatggctgaaatcagagctcatctaaaaaatagcgctgaaaataaagataaaaacgaggatattttcccggaagatgtaataattccatctactaagcccaaaaccaaacgagccactactcctcgtaaaccagcggctactaaaagatcaaccaaaaaggaggaagtggaagaagaagtagttatagaggaatatcatcaaacaactgaaaaaaattctccatctcctggagtcagcgacattgtagaaagcgtggccgctgtagagctcgatgatagcgacggggatgatgaacctatggtacaagttgaagctggtaaagtaaatcatagtgctagaagcgatctctctgacctaaaggtggctaccgacaatatcgttaaagatcttaagaaaattattactagaatctctgcagtatcgacggttctagaggatgttcaagcagctggtatctctagacaatttacttctatgactaaagctattacaacactatctgatctagtcaccgagggaaaatctaaagttgttcgtaaaaaagttaaaacttgtaagaagtaaatgcgtgcacttttttataaagatggtaaactctttaccgataataattttttaaatcctgtatcagacgataatccagcgtatgaggttttgcaacatgttaaaattcctactcatttaacagatgtagtagtatatgaacaaacgtgggaggaggcgttaactagattaatttttgtgggaagtgattcaaaaggacgtagacaatacttttacggaaaaatgcatgtacagaatcgcaacgctaaaagagatcgtatttttgttagagtatataacgttatgaaacgaattaattgttttataaacaaaaatataaagaaatcgtccacagattccaattatcagttggcggtttttatgttaatggaaactatgttttttattagatttggtaaaatgaaatatcttaaggagaatgaaacagtagggttattaacactaaaaaataaacacatagaaataagtcccgatgaaatagttatcaagtttgtaggaaaggacaaagtttcacatgaatttgttgttcataagtctaatagactatataagccgctattgaaactgacggatgattctagtcccgaagaatttctgttcaacaaactaagtgaacgaaaggtatatgaatgtatcaaacagtttggtattagaatcaaggatctccgaacgtatggagtcaattatacgtttttatataatttttggacaaatgtaaagtccatatctcctcttccatcaccaaaaaagttaatagcgttaactatcaaacaaactgctgaagtggtaggtcatactccatcaatttcaaaaagagcttatatggcaacgactattttagaaatggtaaaggataaaaattttttagatgtagtatctaaaactacgttcgatgaattcctatctatagtcgtagatcacgttaaatcatctacggatggatgatatagatctttacacaaataattacaaaaccgataaatggaaatggataagcgtatgaaatctctcgcaatgaccgctttctttggggagctaagcacattagatattatggcattgataatgtctatatttaaacgccatccaaacaataccattttttcagtggataaggatggtcagtttatgattgatttcgaatacgataattataaggcttctcaatatttggatctgaccctcactccgatatctggagatgaatgcaagactcacgcatcgagtatagccgaacaattggcgtgtgtggatattattaaagaggatattagcgaatatatcaaaactactccccgtcttaaacgatttataaaaaaataccgcaatagatcagatactcgcatcagtcgagatacagaaaagcttaaaatagctctagctaaaggcatagattacgaatatataaaagacgcttgttaataagtaaatgaaaaaaaactagtcgtttataataaaacacgatatggatgccaacgtagtatcatcttctactattgcgacgtatatagacgctttagcgaagaatgcttcggaattagaacagaggtctaccgcatacgaaataaataatgaattggaactagtatttattaagccgccattgattactttgacaaatgtagtgaatatctctacgattcaggaatcgtttattcgatttaccgttactaataaggaaggtgttaaaattagaactaagattccattatctaaggtacatggtctagatgtaaaaaatgtacagttagtagatgctatagataacatagtttgggaaaagaaatcattagtgacggaaaatcgtcttcacaaagaatgcttgttgagactatcgacagaggaacgtcatatatttttggattacaagaaatatggatcctctatccgactagaattagtcaatcttattcaagcaaaaacaaaaaactttacgatagactttaagctaaaatattttctaggatccggtgcccagtctaaaagttctttattacacgctattaatcatccaaagtcaaggcctaatacatctctggaaatagaatttacacctagagacaatgaaacagttccatatgatgaactaataaaggaattgacgactctctcgcgtcatatatttatggcttctccagagaatgtaattctttctccgcctattaacgcgcctataaaaacctttatgttgcctaaacaagatatagtaggtttggatctggaaaatctatatgccgtaactaagactgacggcattcctataactatcagagttacatcaaacgggttgtattgttattttacacatcttggttatattattagatatcctgttaagagaataatagattccgaagtagtagtctttggtgaggcagttaaggataagaactggaccgtatatctcattaagctaatagagcctgtgaatgcaatcaatgatagactagaagaaagtaagtatgttgaatctaaactagtggatatttgtgatcggatagtattcaagtcaaagaaatacgaaggtccgtttactacaactagtgaagtcgtcgatatgttatctacatatttaccaaagcaaccagaaggtgttattctgttctattcaaagggacctaaatctaacattgattttaaaattaaaaaggaaaatactatagaccaaactgcaaatgtagtatttaggtacatgtccagtgaaccaattatctttggagagtcgtctatctttgtagagtataagaaatttagcaacgataaaggctttcctaaagaatatggttctggtaagattgtgttatataacggcgttaattatctaaataatatctattgtttggaatatattaatacacataatgaagtgggtattaagtccgtggttgtacctattaagtttatagcagaattcttagttaatggagaaatacttaaacctagaattgataaaaccatgaaatatattaactcagaagattattatggaaatcaacataatatcatagtcgaacatttaagagatcaaagcatcaaaataggagatatctttaacgaggataaactatcggatgtgggacatcaatacgccaataatgataaatttagattaaatccagaagttagttattttacgaataaacgaactagaggaccgttgggaattttatcaaactacgtcaagactcttcttatttctatgtattgttccaaaacatttttagacgattccaacaaacgaaaggtattggcgattgattttggaaacggtgctgacctggaaaaatacttttatggagagattgcgttattggtagcgacggatccggatgctgatgctatagctagaggaaatgaaagatacaacaaattaaactctggaattaaaaccaagtactacaaatttgactacattcaggaaactattcgatccgatacatttgtctctagtgtcagagaagtattctattttggaaagtttaatatcatcgactggcagtttgctatccattattcttttcatccgagacattatgctaccgtcatgaataacttatccgaactaactgcttctggaggcaaggtattaatcactaccatggacggagacaaattatcaaaattaacagataaaaagacttttataattcataagaatttacctagtagcgaaaactatatgtctgtagaaaaaatagctgatgatagaatagtggtatataatccatcaacaatgtctactccaatgactgaatacattatcaaaaagaacgatatagtcagagtgtttaacgaatacggatttgttcttgtagataacgttgatttcgctacaattatagaacgaagtaaaaagtttattaatggcgcatctacaatggaagatagaccatctacaagaaactttttcgaactaaatagaggagccattaaatgtgaaggtttagatgtcgaagacttacttagttactatgttgtttatgtcttttctaagcggtaaataataatatggtatgggttctgatctcccagttctaaatgcattaaataattccaatagagcgatttttgttcctataggaccttccaactgtggatactctgtattgttaatagatatattaatacttttgtcgggtaacagaggttctacgtcttttaaaaataaaagtttgataacatctggcctgttcataaataaaaacttggcgattctatatatactcttattatcaaatctagccattgtcttatagatgtgagctactgtaggtgtaccatttgattttctttctaatactatatatttctctcgaagaagttcttgcacatcatctgggaataaaatactactgttgagtaaatcagttattttttttatatcgatattgatggacatttttatagttaaggataataagtatcccaaagtagataacgacgataacgaagtatttatacttttaggaaatcacaatgactttatcagattaaaattaacaaaattaaaggagcatgtatttttttctgaatatattgtgactccagatacatatggatctttatgcgtcgaattaaatgggtctagttttcagcacggcggtagatatatagaggtggaggaatttatagatgctggaagacaagttagatggtgttctacatccaatcatatatctaaagatatacccgaagatatgcacactgataaatttgtcatttatgatatatacacttttgacgctttcaagaataaacgattggtattcgtacaggtacctccgtcgttaggagatgatagtcatttgactaatccgttattgtctccgtattatcgtaattcagtagccagacaaatggtcaatgatatgatttttaatcaagattcatttttaaaatatttattagaacatctgattagaagccactatagagtttctaaacatataacaatagttagatacaaggataccgaagaattaaatctaacgagaatatgttataatagagataagtttaaggcgtttgtattcgcttggtttaacggcgtttcggaaaatgaaaaggtactagatacgtataaaaaggtatctaatttgatataatgaattcagtgactgtatcacacgcgccatatactattacttatcacgatgattgggaaccagtaatgagtcaattggtagagttttataacgaagtagccagttggctgctacgagacgagacgtcgcctattcctgataagttctttatacagttgaaacaaccgcttagaaataaacgagtatgtgtgtgcggtatagatccgtatccgaaagatggaactggtgtaccgttcgaatcaccaaattttacaaaaaaatcaattaaggagatagcttcatctatatctagattaaccggagtaattgattataaaggttataaccttaatataatagacggggttataccctggaattattacttaagttgtaaattaggagaaacaaaaagtcacgcgatctactgggataagatttccaagttactgctgcagcatataactaaacacgttagtgttctttattgtttgggtaaaacagatttctcgaatatacgggccaagttagaatccccggtaactaccatagtcggatatcatccagcggctagagaccgccaattcgagaaagatagatcatttgaaattatcaacgttttactggaattagacaacaaggcacctataaattgggctcaagggtttatttattaatgctttagtgaaattttaacttgtgttctaaatggatgcggctattagaggtaatgatgttatctttgttcttaagactataggtgtcccgtcagcgtgcagacaaaatgaagatccaagatttgtagaagcatttaaatgcgacgagttagaaagatatattgagaataatccagaatgtacactattcgaaagtcttagggatgaggaagcatactctatagtcagaattttcatggatgtagatttagacgcgtgtctagacgaaatagattatttaacggctattcaagattttattatcgaggtgtcaaactgtgtagctagattcgcgtttacagaatgcggcgccattcatgaaaatgtaataaaatccatgagatctaatttttcattgactaagtctacaaatagagataaaacaagttttcatattatctttttagacacgtataccactatggatacattgatagctatgaaacgaacactattagaattaagtagatcatctgaaaatccactaacaagatcgatagacactgccgtatataggagaaaaacaactcttcgggttgtaggtactaggaaaaatccaaattgcgacactattcatgtaatgcaaccaccgcatgataatatagaagattacctattcacttacgtggatatgaacaacaatagttattacttttctctacaacaacgattggaggatttagttcctgataagttatgggaaccagggtttatttcattcgaagacgctataaaaagagtttcaaaaatattcattaattctataataaactttaatgatctcgatgaaaataattttacaacggtaccactggtcatagattacgtaacaccttgtgcattatgtaaaaaacgatcgcataaacatccgcatcaactatcgttggaaaatggtgctattagaatttacaaaactggtaatccacatagttgtaaagttaaaattgttccgttggatggtaataaactgtttaatattgcacaaagaattttagacactaactctgttttattaaccgaacgaggagaccatatagtttggattaataattcatggaaatttaacagcgaagaacccttgataacaaaactaattttgtcaataagacatcaactacctaaggaatattcaagcgaattactctgtccaagaaaacgaaagactgtagaagctaacatacgagacatgttagtagattcagtagagaccgatacctatccggataaacttccgtttaaaaatggtgtattggacctggtagacggaatgttttactctggagatgatgctaaaaaatatacgtgtactgtatcaaccggatttaaatttgacgatacaaagttcgtcgaagacagtccagaaatggaagagttaatgaatatcattaacgatatccaaccattaacggatgaaaataagaaaaatagagagctatatgaaaaaacattatctagttgtttatgcggtgctaccaaaggatgtttaacattcttttttggagaaactgcaactggaaagtcgacaaccaaacgtttgttaaagtctgctatcggtgacctgtttgttgagacgggtcaaacaattttaacagatgtattggataaaggacctaatccatttatcgctaacatgcatttgaaaagatctgtattctgtagcgaactacctgattttgcctgtagtggatcaaagaaaattagatctgacaatattaaaaagttgacagaaccttgtgtcattggaagaccgtgtttctccaataaaattaataatagaaaccatgcgacaatcattatcgatactaattacaaacctgtttttgataggatagataacgcattaatgagaagaattgccgtcgtgcgattcagaacacacttttctcaaccttctggtagagaggctgctgaaaataatgacgcgtacgataaagtcaaactattagacgaggggttagatggtaaaatacaaaataatagatatagattcgcatttctatacttgttggtgaaatggtacagaaaatatcatgttcctattatgaaactatatcctacacccgaagagattcctgactttgcattctatctcaaaataggtactctgttagtatctagctctgtaaagcatattccattaatgacggacctctccaaaaagggatatatattgtacgataatgtggtcactcttccgttgactactttccaacagaaaatatccaagtattttaattctagactatttggacacgatatagagagcttcatcaatagacataagaaatttgccaatgttagtgatgaatatctgcaatatatattcatagaggatatttcatctccgtaaatatatgctcatatatttatagaagatatcacatatctaaatgaataccggaatcatagatttatttgataatcatgttgatagtataccaactatattacctcatcagttagctactctagattatctagttagaactatcatagatgagaacagaagcgtgttattgttccatattatgggatcaggtaaaacaataatcgctttgttgttcgccttggtagcttccagatttaaaaaggtttacattctagtgcctaatatcaacattttgaaaatttttaattataatatgggtgtagctatgaacttgtttaatgacgaattcatagctgagaatatctttattcattccacaacaagtttttattctcttaattataacgataacgtcattaattataacggattatctcgctacaataactctatttttatcgttgatgaggcacataatatctttgggaataatactggagaacttatgaccgtgataaaaaataaaaacaagattccttttctactattgtctggatctcccattactaacacacctaatactctgggtcatattatagatttaatgtccgaagagacgatagattttggtgagattattagtcgtggtaagaaagtaattcagacacttcttaacgaacgcggtgtgaatgtacttaaggatttgcttaaaggaagaatatcatattacgaaatgcctgataaagatctaccaacgataagatatcacggacgtaagtttctagatactagagtagtatattgtcacatgtctaaacttcaagagagagattatatgattactagacgacagctatgttatcatgaaatgtttgataaaaatatgtataacgtgtcaatggcagtattgggacaacttaatctgatgaataatttagatactttatttcaggaacaggataaggaattgtacccaaatctgaaaataaataatggcgtgttatacggagaagaattggtaacgttaaacattagttccaaatttaaatactttattaatcggatacagacactcaacggaaaacattttatatacttttctaattctacatatggcggattggtaattaaatatatcatgctcagtaatggatattctgaatataatggttctcagggaactaatccacatatgataaacggcaaaccaaaaacatttgctatcgttactagtaaaatgaaatcgtctttagaggatctattagatgtgtataattctcctgaaaacgatgatggtagtcaattgatgtttttgttttcgtcaaacattatgtccgaatcctatactctgaaagaggtaaggcatatttggtttatgactatcccagatactttttctcaatacaaccaaattcttggacgatctattagaaaattctcttacgccgatatttctgaaccagttaatgtatatcttttagccgccgtatattccgatttcaatgacgaagtaacgtcattaaacgattacacacaggatgaattgattaatgttttaccatttgacatcaaaaagctgttatatctaaaatttaagactaaagaaacgaatagaatatactctattcttcaagagatgtctgaaacgtattctcttccaccacatccatcaattgtaaaagttttattgggagaattggtcagacaatttttttataataattctcgtattaagtataacgactccaagttacttaaaatggttacatcagttataaaaaataaagaagacgctaggaattacatagatgatattgtaaacggtcacttctttgtatcgaataaagtatttgataaatctcttttatacaaatacgaaaacgatattattacagtaccgtttagactttcctacgaaccatttgtttggggagttaactttcgtaaagaatataacgtggtatcttctccataaaactgatgaaatatataaagaaataaatgtcgagctttgttaccaatggataccttccagttacattggaaccacacgagctgacgttagacataaaaactaatattaggaatgccgtatataagacgtatctccatagagaaattagtggtaaaatggccaagaaaatagaaattcgtgaagacgtggaattacctctcggcgaaatagttaataattctgtagttataaacgttccgtgtgtaataacctacgcgtattatcacgttggggatatagtcagaggaacattaaacatcgaagatgaatcaaatgtaactattcaatgtggagatttaatctgtaaactaagtagagattcgggtactgtatcatttagcgattcaaagtactgcttttttcgaaatggtaatgcgtatgacaatggcagcgaagtcactgccgttctaatggaggctcaacaaggtatcgaatctagttttgtttttctcgcgaatatcgtcgactcataaaaaagagaatagcggtaagtataaacacgaatactatggcaataattgcgaatgttttattctcttcgatatatttttgataatatgaaaaacatgtctctctcaaatcggacaaccatctcataaaatagttctcgcgcgctggagaggtagttgctgctcgtataatctccccagaataatatacttgcgtgtcgtcgttcaatttatacggatttctatagttctctgttatataatgcggttttccatcatgattagacgacgacaatagtgttctgaatttagatagttgatcagaatgaatgtttattggcgttggaaaaattatccatacagcgtctgcagagtggttgatagttgttcctagatatgtaaaataatccaacttactaggcagcaaattgtctagataaaatactgaatcaaacggtgcagacgtattggcggatctaatggaatccaattgattaactatcttttgaaaatatacatttttatgatccaatacttgtaagaatatagaaataatgataagtccatcatcgtgtttttttgcctcttcataagaactatattttttcttattccaatgaacaagattaatctctccagagtatttgtacacatctatcaagtgattggatccataatcgtcttcctttccccaatatatatgtagtgatgataacacatattcattggggagaaaccctccacttatatatcctcctttaaaattaatccttactagttttccagtgttctggatagtggttggtttcgactcattataatgtatgtctaacggcttcaatcgcgcgttagaaattgcttttttagtttctatattaataggagatagttgttgcggcatagtaaaaatgaaatgataactgtttaaaaatagctcttagtatgggaattacaatggatgaggaagtgatatttgaaactcctagagaattaatatctattaaacgaataaaagatattccaagatcaaaagacacgcacgtgtttgctgcgtgtataacaagtgacggatatccgttaataggagctagaagaacttcattcgcgttccaggcgatattatctcaacaaaattcagattctatctttagagtatccactaaactattacggtttatgtactacaatgaactaagagaaatctttagacggttgagaaaaggttctatcaacaatatcgatcctcactttgaagagttaatattattgggtggtaaactagataaaaaggaatctattaaagattgtttaagaagagaattaaaagaggaaagtgatgaacgtataacagtaaaagaattcggaaatgtaattctaaaacttacaacgcgcgataaattatttaataaagtatatataggttattgcatggcgtgttttattaatcaatcgttggaggatttatcgcatactagtatttacaatgtagaaattagaaagattaaatcattaaatgattgtattaacgacgataaatacgaatatctgtcttatatttataatatgctagttaatagtaaatgaacttttacagatctagtataattagtcagattattaagtataatagacgactagctaagtctattatttgcgaggatgactctcaaattattacactcacggcattcgttaaccaatgcctatggtgtcataaacgagtatccgtgtccgctattttattaactactgataacaaaatattagtatgtaacagacgagatagttttctctattctgaaataattagaactagaaacatgtttagaaagaaacgattatttctgaattattccaattatttgaacaaacaggaaagaagtatactatcgtcatttttttctctagatccagctactgctgataatgatagaatagacgctatttatccgggtggcatacccaaaaggggtgagaatgttccagagtgtttatccagggaaattaaagaagaagttaatatagacaattcttttgtattcatagacactcggttttttattcatggcatcatagaagataccattattaataaattttttgaggtaatcttctttgtcggaagaatatctctaacgagtgatcaaatcattgatacatttaaaagtaatcatgaaatcaaggatctaatatttttagatccgaattcaggtaatggactccaatacgaaattgcaaaatatgctctagatactgcaaaactcaaatgttatggccatagaggatgttattacgaatcattaaaaaaattaactgaggatgattgattagaaaatataaattaatttaccatcgtgtatttttataacgggattgtccggcatatcatgtagatagttaccgtctacatcgtatactcgaccatctacgcctttaaatcctctatttattgacattaatctattagaattggaataccaaatattagtaccctcaattagtttattggtaatatttttgttagacgatagatcgatggctcttgaaaccaaggttttccaaccggactcattgtcgatcggtgagaagtctttttcattagcatgaatccattctaatgatgtatgtttaaacactctaaacaattggacaaattcttttgatttgctttgaatgatttcaaataggtcttcgtctacagtaggcataccattagataatctagccattataaagtgcacgtttacatatctacgttctggaggagtaagaacgtgactattgagacgaatggctcttcctactatctgacgaagagacgcctcgttccatgtcatatctaaaatgaagatatcattgattgagaagaagctaataccctcgcctccactagaagagaatacgcatgttttaatgcattctccgttagtgtttgattcttggttaaactcagccaccgccttgattctagtatcttttgttctagatgagaactctatattagagataccaaagactttgaaatatagtaataagatttctattcctgactgattaacaaatggttcaaagactagacatttaccatgggatgctaatattcccaaacatacatctataaatttgacgcttttctcttttaattcagtaaatagagagatatcagccgcactagcatcccctcccaatagttctccccttttaaaggtatctaatgcagatttagaaaattctctatctcttaatgaatttttaaaatcattatatagtgttgctatctcttgcgcgtattcgcccggatcacgattttgtctttcaggaaagctatcgaacgtaaacgtagtagccatacgtctcagaattctaaatgatgatatacctgtttttatttcagcgagtttagccttttgataaatttcttcttgctttttcgacatattaacgtatcgcattaatactgttttcttagcgaatgatgcagacccttctacgtcatcaaaaatagaaaactcgttattaactatgtacgaacataggcctcctagtttggagactaattctttttcatcaactagacgtttattctcaaatagcgattggtgttgtaaggatcctggtcgtagtaagttaaccaacatggtgaattcttgcacactattgacgataggtgtagccgataaacaaatcatcttatggttttttaatgcgatggtcttagataaaaaattatatactgaacgagtaggacggatcttaccatcttctttgattaatgatttagaaatgaagttatgacattcatcaataatgacgcatattctactcttggaattaatagttttgatattagtaaaaaatttatttctaaaattttgatcatcgtaattaataaaaatacaatccttcgttatctctggagcgtatctgagtatagtgttcatccaaggatcttctatcaaagcctttttcaccaataagataatagcccaattcgtataaatatccttaagatgtttgagaatatatacagtagtcattgttttaccgacacccgtttcatggaacaataaaagagaatgcatactgtctaatcctaagaaaactcttgctacaaaatgttgataatccttgaggcgtactacgtccgaccccatcatttcaacaggcatattagtagttctgcgcaatgcataatcgatataggccgcgtgtgatttactcatttatgagtgataagtaataactatgttttaaaaatcacagcagtagtttaactagtcttctctgatgtttgttttcgatactttttgaatcagaagtcatactagaataaagcaacgagtgaacgtaatagagagcttcgtatactctattcgaaaactctaagaacttattaatgaattccgtatccactggattgtttaaaatactaaattgaacactgttcacatccttccaagaagaagacttagtgacggacttaacatgagacataaataaatccaaattttttttacaaacatcactagccaccataatggcgctatcttttaaccagctatcgcttacgcattttagcagtctaacatttttaaagagactacaatatattctcatagtatcgattacacctctaccgaataaagttggaagtttaataatacaatatttttcgtttacaaaatcaaataatggtcgaaacacgtcgaaggttaacatcttataatcgctaatgtatagattgttttcagtgagatgattattagatttaatagcatctcgttcacgtttgaacagtttattgcgtgcgctgaggtcggcaactacggcgtccgctttagtactcctcccataatactttacgctattaatctttaaaatttcatagactttatctagatcgctttctggtaacatgatatcatgtgtaaaaagttttaacatgtcggtcggcattctatttagatcattaactctagaaatctgaagaaagtaattagctccgtattccagactaggtaatgggcttttacctagagacagattaagttctggcaatgtttcataaaatggaagaaggacatgcgttccctcccggatattttttacaatttcatccatttacaactctatagtttgttttcattattattagttattatctcccataatcttggtaatacttaccccttgatcgtaagataccttatacaggtcattacatacaactaccaattgtttttgtacataatagattggatggttgacatccatggtggaataaactactcgaacagatagtttatctttccccctagatacattagccgtaatagttgtcggcctaaagaatatctttggtgtaaagttaaaagttagggttcttgttccattattgctttttgtcagtagttcattataaattctcgagatgggtccgttctctgaatatagaacatcatttccaaatctaacttctagtctagaaataatatcggtcttattcttaaaatctattcccttgatgaagggatcgttaatgaacaaatccttggcctttgattcggctgatctattatctccgttatagacgttacgttgactagtccaaagacttacaggaatagatgtatcgatgatgttgatactatgtgatatgtgagcaaagattgttctcttagtggcatcactatatgttccagtaatggcggaaaactttttagaaatgttatatataaaagaattttttcgtgttccaaacattagcagattagtatgaagataaacactcatattatcaggaacattatcaatttttacatacacatcagcatcttgaatagaaacgataccatcttctggaacctctacgatctcggcagactccggataaccagtcggtggaccatcgctaacaataactagatcatccaacaatctactcacatatgcatctatataatctttttcatcttgtgagtaccctggatacgaaataaatttattatccgtatttccataataaggtttagtataaacagagagcgatgttgccgcatgaacttcagttacagtcgccgttggttggtttatttgacctattactctcctaggtttctctataaatgatggtttaatttgtacattcttaaccatatatccaataaagctcaattcaggaacataaacaaattctttgttgaacgtttcaaagtcgaacgaagagtcacgaataacgatatcggatactggattgaaggttaccgttacggtaatttttgaatcggatagtttaagactgctgaatgtatcttccacatcaaacggagttttaatataaacgtatactgtagatggttctttaatagtgtcattaggagttaggccaatagaaatatcattaagttcactagaatatccagagtgtttcaaagcaattgtattattgatacaattattatataattcttcgccctcaatttcccaaataacaccgttacacgaagagatagatacgtgattaatacatttatatccaacatatggtacgtaaccgaatcttcccatacctttaacttctggaagttccaaactcagaaccaaatgattaagcgcagtaatatactgatccctaatttcgaagctagcgatagcctgattgtctggaccatcgtttgtcataactccggatagagaaatatattgcggcatatataaagttggaatttgactatcgactgcgaagacattagaccgtttaatagagtcatccccaccgatcaaagaattaatgatagtattattcattttctatttaaaatggaaaaagcttacaataaactccgtagagaaatatctataatttgtgagttttccttaaagtaacagcttccgtaaacgccgtctttatctcttagtaagtttattgtatttataaccttttccttatcttcatagaatactaaaggcaacaaagaaatttttggttcttctctaagagctacgtgagacttaaccatagacgccaacgaatccctacatattttagaacagaaatacccaacttcaccacccttgaatgtctcaatactaataggtttaaaaaccaaatcttgattacaaaaccaacacttatcaattacactatttgtcttaatagacacatctgccatagatttataatactttggtagtatacaagcgagtgcttcttctttagcgggcttaaagactgctttaggtgctgaaataaccacatctggaaggcttactcgcttagccatttaattacggaactatttttttatacttctaatgagcaagtagaaaacctctcatctacaaaaacatactcgtgtccataatcctctaccatagttacacgttttttagatctcatatgtgctaaaaagttttcccatactaattggttactattatttttcgtataatttttaacagtttgaggttttagatttttagttacagaagtgatatcgaatattttatccaaaaagaatgaataattaattgtcttagaaggagtgttttcttggcaaaagaataccaagtgcttaaatatttctactacttcattaatcttttctgtactcagattcagtttctcatcttttacttgattgattatttcaaagactaacttataatcctttttatttattctctcgttagccttaagaaaactagatacaaaatttgcatctacatcatccgtggatatttgatttttttccatgatatccaagagttccgagataatttctccagaacattgatgagacaataatctccgcaatacatttctcaaatgaataagtttattagacacatggaagtttgactttttttgtacctttgtacatttttgaaataccgactcgcaaaaaatacaatattcatatccttgttcagatactataccgttgtgtctacaaccgctacataatcgtagattcatgttaacactctacgtatctcgtcgtccaatattttatataaaaacattttatttctagacgttgccagaaaatcctgtaatatttttagttttttgggctgtgaataaagtatcgccctaatattgttaccgtcttccgccaatatagtagttaaattatccgcacatgcaaaagaacaccgcttaggcggattcagtacaatgttatatttttcgtaccaactcatttaaatatcataatctaaaatagttctgtaatatgtctagcgctaatatattgatcataatcctgtgcataaattaagatacaacaatgtctcgaaatcatcgacatggcttcttccatagttagaagatcgtcgtcaaagttagcaacgtgattcatcaacatttgctgttttgaggcagcaaatactgaaccgtcgccattcaaccattcataaaaaccatcgtctgaatccattgataatttcttgtactggtttttgagagctcgcatcaatctagcatttctagctcccggattgaaaacagaaagaggatcgtacatccagggtccattttctgtaaatagaatcgtataatgtcccttcaagaagatatcagacgatccacaatcaaagaattggtctccgagtttgtaacaaactgcggactttaacctatacatgataccgtttagcatgatttctggtgatacgtcaatcggagtatcatctattagagatctaaagccggtgtaacattctccaccaaacatattcttattctgacgtcgttctacataaaacatcattgctccattaacgataacaggggaatgaacagcactacccatcacattagttcccaatggatcaatgtgtgtaactccagaacatcttccatatcctatgttaggaggagcgaacaccactcttccactattgccatcgaatgccatagaataaatatccttggaattgatagaaatcggactgtcggatgttgtgatcatcttcataggattaacaactatgtatggtgccgcctgaagtttcatatcgtaactgatgccgtttataggtctagccacagaaaccaacgtaggtctaaatccaactatagacaaaatagaagccaatatctgttcctcatctgtcataacttgagagcatccagtatgaataatcttcattagatggggatctaccgcatcatcatcgttacaataaaaaattcccattctaatgttcataattgcttttctaatcatggtatgcatgtttgctctctgaatctctgtggaaattagatctgatacacctgtaatcactatcggattatcctccgtaagacgattaaccaacaacatataattataagactttacttttctaaattcataaagttgctggattaggctataggtgtctccatgtacatacgcgttctcgagcgcaggaagtttaataccgaatagtgccatcagaataggatgaatatagtaattagtttctggttttctataaataaaagacaaatcttgtgaactagacatatcggtaaaatgcatggattggaatcgtgtagtcgacagaagaatatgatgattagatggagagtatattttatctaactctttgagttggtcaccgattctaggactagctcgagaatgaataagtactaaaggatgagtacatttcacagaaacactagcattgttcaatgtgctctttacatgggtaaggagttgaaatagctcgtttctatttgttctgacaatatttagtttattcataatgttaagcatatcctgaatagtaaagttagatgtgtcatacttgttagtagttagatatttagcaattgcattcccatcatttctcaatctcgtactccaatcatgtgtagatgctacttcgtcgatggaaaccatacaatcctttttgataggctgttgagattgattatttcctgcacgtttaggtttggtacgttgatttctagcccctgcggatataaagtcatcgtctacaatttgggacaatgaattgcatacactacaagacaaagatttatcagaagtgtgaatatgatcttcatctaccaaagaaagagtttgattagtataactagattttagtcctgcgttagatgttaaaaaaacatcgctattgaccacggcttccattatttatattcgtagtttttactcgaaagcgtgattttaatatccaatcttattacttttggaatcgttcaaaacctttgactagttgtagaatttgatctattgccctacgcgtatactcccttgcatcatatacgttcgtcaccagatcgtttgtttcggcctgaagttggtgcatatctctttcaacattcgacatgagatccttaagggccatatcgtctagattttgttgagatgctgctcctggatttggattttgttgtgctgttgtacatactgtaccaccagtaggtgtaggagtacatacagtggccacaataggaggttgaggaggtgtaaccgttggagtagtacaagaaatatttccatccgattgttgtgtacatgtagttgttggtaacgtctgagaaggttgggtagatggcggtgtcgtcgtcttttgatctttattaaatttagagataatatcctgaacagcattgctcggcgtcaacgctggaaggagtgaactcgccggcgcatcagtatcttcagacagccaatcaaaaagattagacatatcagatgatgtattagtttgttgtcgtggttttggtgtaggaacagtactactaggtagaagaataggagccggtgtagctgttggaaccggctgtggagttatatgaatagttggttgtagcggttggataggctgtctgctggcgaccgtcatattatctctagctagttgttctcgcaactgtctttgataatacgactcttgagactttagtcctatttcaatcgcttcatcctttttcgtatccggatccttttcttcagaataatagattgacgactttggtgtagaggattctgccagcccctgtgagaacttgttaaagaagtccatttaaggctttaaaattgaattgcgattataagattaaatggcagacacagacgatattatcgactatgaatccgatgatctcaccgaatacgaggatgatgaagaagaggaagaagatggagagtcactagaaactagtgatatagatcccaaatcttcttataagattgtagaatcagcatccactcatatagaagatgcgcattccaatcttaaacatatagggaatcatatatctgctcttaaacgacgctatactagacgtataagtctatttgaaatagcgggtataatagcagaaagctataacttgcttcaacgaggaagattacctctagtttcagaattttctgacgaaacgatgaagcaaaatatgctacatgtaattatacaagagatagaggagggttcttgtcctatagtcatcgaaaagaacggagaattgttgtcggtaaacgattttgacaaagatggtctaaaattccatctagactatattatcaaaatttggaaacttcaaaaacgatattagaatttatacgaatatcgttctctaaatgtcacaatcaagtctcgcatgttcagcaatttattgtcgtactttatatcgtgttcattaacgatatcttgcaaaatagtaatgattctatcttccttcgatagatattcttcagagattattgtcttatattttttcttgttatccgatatgaatttgataagactttgaacattattgatacccgtctgtttaattttttctacagatattttagttttggcagattctatcgtatctgtcaatagacatccaacatcgacattcgacgtcaattgtctataaatcaacgtataaattttagaaataacattagcgaattgttgtgcattgatgtcgttattctgaaacagtatgattttaggtagcattttcttaacaaagagaacgtatttattgttactcagttgaacagatgatatatccagattactaacgcatctgattccgtataccaaactttcagaagaaatggtgtacaattgtttgtattcattcaatgtctctttttcagaaattagtttagagtcgaatactgcaataattttcaagagatagttttcatcagataagattttatttagtgtagatatgataaaactattgttttgttggagaacttgatacgccgcgttctctgtagtcgacgctctcaaatgggaaacaatctccattatttttttggaatcggatactatatcttcggtatcttgacgcagtctagtatacatagagttaagagagattagagtttgtacattaagcaacatgtctctaaatgtggctacaaacttttcctttttcacataatctagtttattatataccgatttcacaacggcaccagatttaaggaaccagaatgaaaaactctgataactacaatatttcatcatagttacgattttatcatcttctatagttggtgtaatagcgcatacctttttctccaagactggaaccaacgtcataaaaatgtttaaatcaaaatccatatcaacatctgatgcgctaagaccagtctcgcgttcaagattatctttactaatggtgacgaactcatcatatagaactctaagtttgtccattatttatttacagatttagttgtttaatttatttgtgctcttccagagttgggatagtatttttctaacgtcggtattatattattaggatctacgttcatatgtatcataatattaatcatccacgttttgataaatctatctttagcttctgaaataacgtatttaaacaaaggagaaaaatatttagctacggcatcagacgcaataacattttttgtaaatgtaacgtatttagacgacagatcttcgttaaaaagttttccatctatgtagaatccatcggttgttaacaccattcccgcgtcagattgaataggagtttgaatagtttgttttggaaatagatccttcaataacttatagttgggtgggaaaaaatcgattttatcactagactctttcttttttactatcattacctcatgaactatttcttgaatgagtatatgtattttctttcctatatcggacgcgttcattggaaaatataccatgtcgttaactataagaatatttttatcctcgtttacaaactgaataatatcagatgtagttcgtaaacgaactatatcatcaccagcacaacatctaactatatgatatccactagtttcctttagccgtttattatcttgttccatattagcagtcattccatcatttaagaaggcgtcaaagataatagggagaaatgacattttggattctgttacgactttaccaaaattaaggatatacggacttactatctttttctcaacgtcgatttgatgaacacacgatgaaaatgtgcttctatgagattgatcatgtagaaaacaacaagggatacaatatttccgcatatcatgaaatatattaagaaatcccaccttattatatttccccaaaggatccatgcatgtaaacattatgccgttatcattaataaagacttctttctcatcggatttgtaaaagttgttactgatttttttcattccaggatctagataattaataatgatgggttttctattcttattctttgtattttggcatatcctagaccagtaaacagtttccactttggtaaaatcagcagacttttgaacgctattaaacatggcattaatggcaataactaaaaatgtaaaatatttttctatgttaggaatatggtttttcactttaatagatatatggtttttggccaaaatgatagatatttttttatccgaggatagtaaaatattattagtcgccgtctctataaaaatgaagctagtctcgatatccaattttattctagaattgataggagtcgccaaatgtaccttatacgttatatctcccttgatgcgttccatttgtgtatctatatcggacacaagatctgtaaatagttttacgttattaatcatcacggtatcgccgtcgctagataacgctaatgtaccatccaagtcccaaatggagagatttaactgttcatcgtttagaataaaatgattaccggtcatattaataaagtgttcatcgtatctagataacaacgacttataattaatgtccaagtcttgaactcgctgaatgatcttttttaacccagttagttttagattggtacgaaatatattgttaaactttgattctacagtaatgtccaaatctagttgtggaaatacttccatcaacattgtttcaaacttgataatattattatctacatcttcatacgatccaaattccggaatagatgtatcacatgctcttgccacccagataaccaaaaagtcacacgctccaggatatacattgtataaaaagctatcgttttttagtagtgtttttttctgagtatatacgaagggattaaaaatagtattatcaacgtaactatattccaaattattcttatgagaatagataataatatcgtccttaatatctaacaaatttcctaaatatccctttaattgagtcattcgaagcgtcaatagaatatgtctcttaactatttccggctgttgtatatttaaatgacttcgtaaaaaataatatatgggcgacttctcatctatgtaatcatatggagtgagatatagggctcgttctacctcctgccccttacccacctgtaataccaattgcggacttactatatatcgcatatttatatcgtggggtaaagtgaaaatctactaccgatgatgtaagtcttacaatgttcgaaccagtaccagatcttaatttggaggcctccgtagaactaggggaggtaaatatagatcaaacaacacctatgataaaggaaaatagcggttttatatcccgtagtagacgtctattcgcccatagatctaaggatgatgagagaaaactagcactacgattctttttacaaagactttattttttagatcatagagagattcattatttgttcagatgcgttgacgctgtaaaagacgtcactattaccaaaaaaaataacattatcgtggcgccttatatagcacttttaactatcgcatcaaaaggatgcaaacttacagaaacaatgattgaagcattttttccagaactatataatgaacatagtaagaaatttaaattcaactctcaagtatccatcatccaagaaaaactcggataccagtttggaaactatcacgtttatgattttgaaccgtattactctacagtagctctggctattcgagatgaacattcatctggcatttttaatatccgtcaagagagttatctggtaagttcattatctgaaataacatatagattttatctaattaatctaaaatctgatcttgttcaatggagtgctagtacgggcgctgtaattaatcaaatggtaaatactgtattgattacagtgtatgaaaagttacaactggtcatagaaaatgattcacaatttacatgttcattggctgtggaatcaaaacttccaataaaattacttaaagatagaaatgaattatttacaaaattcattaacgagttaaaaaagaccagttcattcaagataagcaaacgcgataaggatacgctactaaaatattttacttaggactggagttagaatttatagacgactcatttcgtttatcattgttactattattactattactatcattattagtgttggcattattagtattcttcttgtcatcttgttcagaaatatacagcaatgctatacctaatactaaatacattatcatgctcgcaatggctctaacaacaacgaaccaaaatgaatttggtcgtagcttttgttcacaaaaatacataaagaaatgtctacataaatctatggcgccattggctacttgaaatagcgccagtcctcctacagattttaatatagctgtataacatgacatttattcatcatcaaaagagacagagtcaccatctgtcatatttagattttttttcatgtgttcaaagtatcctctactcatttcattataatagtttatcatacttagaattttaggacggatcaatgagtaagacttgactagatcgtcagtagtaatttgtgcatcgtctattctgcatccgcttcgtcgaataatgtatagcatcgctttgagattctccatagctatcaagtctttatacaatgacatggaaatatctgtgaatactttatacttctccaacatcgatgccttaacatcatcgcctactttagcattgaaaatacgttctattgtgtagatggatgtagcaagatttttaaacaacaatgccatcttacacgatgattgcctcaagtctccaatcttttgtttagaacgattagctacagagttcaacgcttggctgactagcatattattatctttagaaattgtattcttcaatgaggcgtttatcatatctgtgatttcgttagtcatattacagtctgactgggttgtaatgttatccaacatatcacctatggatacggtacacgtaccagcatttgtaataatcctatctaagatgttgtatggcattgcgcagaaaatatcttctcctgtaatatctccactctcgataaatctactcagattattcttaaatgccttattctctggagaaaagatatcagtgtccatcatttcattaatagtatacgcagaaaagataccacgagtatcaattctatccaagatacttatcggttccgagtcacagataatggtttcctctccttcgggagatcctgcatagaaatatctaggacaatagtttctatactgtctgtaactctgataatctctaaagtcactaactgataccatgaaattgagaagatcaaacgctgaagtaatcaatttttctgcctcgtttttactacaactagttttcatcaatgtagcgacgatgtattgtttagttactcttggtctaatactgatgatagagatattattgcttcccataatggatcttctagtagtcaccttaaagcccattgatgcgaatagcagatagataaagtcttggtatgactcctttctaatatagtacggactacctttgtcacccaactttatacccacataagccataacaacctctttaatagccgtttcatgaggtttatcagccatgagcctgagtagttggaagaatctcatgaatcccgtctcagaaagtcctatatgcatgatagatttatctttcctgggaaactctcgtatagtcatagatgaaatactcttcaaagtttctgaaataagattagtaacagtcttacctccgactactctgggtaacaaacatactctaataggtgttttctctgcggagataatatcagaaaggatagagcaataagtagtattattgtgattataaagaccgaatacataacaggtagaatttataaacatcatgtcctgaaggtttttagacttgtattcctcgtaatccataccgtcccaaaacatggatttggtaactttgatagccgtagatctttgttccttcgccaacaggttaaagaaattaataaagaatttgttgtttctatttatgtccacaaattgcacgtttggaagcgccacggttacattcactgcagcattttgaggatcgcgagtatgaagtacgatgttattgtttactggtatatctggaaagaaatctaccagtctaggaataagagattgatatcgcatagaaatagtaaagtttataatctcatcatcgaagagcattttgttaccattgtaataaatatccactctgtcatatgtataaatgaagtactgttcaaacatgatgagatgtttatatgttggcatagtagtgagatcgacgtttggtaatggcaatgtattaagattaactccataatgtctagcagcatctgcgatgttataagcgtcgtcaaagcggggtcgatcttgtattgttatatattgtctaacacctataagattatcaaaatcttgtctgcttaatacaccgttaacaatttttgccttgaattcttttattggtgcattaataacatccttatagaggatgttaaacaaataagtgttatcaaagttaagatctggatatttcttttctgctagaacatccattgagtcggagccatctggtttaatataaccaccgataaatctagctctgtattctgtatccgtcaatctaatattaagaaggtgttgagtgaaaggtggaagatcgtaaaagctgtgagtattaatgataggattagtttccgaactaatgttaattggggtattaataatatctatatttccagcgttaagtgtaacattaaacagttttaattcacgtgacgtggtatcaattaaataattaatgcccaatttggatatagcagcctgaagctcatcttgtttagttacggatcctaatgagttattaagcaatatatcgaacggatgaacgaaggttgttttaagttggtcacatactttgtaatctagacatagatgcggaagaacggtagaaactatacgaaataaatattcagagtcctctaattgatcaagagtaactattgacttaataggcatcatttatttagtattaaatgacgaccgtaccagtgacggatatacaaaacgatttaattacagagttttcagaagataattatccatctaacaaaaattatgaaataactcttcgtcaaatgtctattctaactcacgttaacaacgtggtagatagagaacataatgccgccgtagtgtcatctccagaggaaatatcctcacaacttaatgaagatctatttccagatgatgattcaccggccactattatcgaacgagtacaacctcatactactattattgacgatactccacctcctacttttcgtagagagttattgatatcggaacaacgtcaacaacgagaaaaaagatttaatattacagtatcgaaaaatgctgaagcaataatggaatctagatctatgataacttctatgccaacacaaacaccatccttgggagtagtttatgataaagataaaagaattcagatgttggaggatgaagtggttaatcttagaaatcaacgatctaatacaaaatcatctgataatttagataattttaccaaaatactatttggtaagactccgtataaatcaacagaagttaataagcgtatagccatcgttaattatgcaaatttgaacgggtctcccttatcagtcgaggacttggatgtttgttcagaggatgaaatagatagaatctataaaacgattaaacaatatcacgaaagtagaaaacaaaaaattatcgtcactaacgtgattattattgtcataaacattatcgagcaagcattgctaaaactcggatttgaagaaatcaaaggactgagtaccgatatcacttcagaaattatcgatgtggagatcggagatgactgcgatgctgtagcatcaaaactaggaatcggtaacagtccggttcttaatattgtattgtttatactcaagatattcgttaaacgaattaaaattatttaatttaatacattcccatatccagacaacaatcgtctggattaatctgttcctgtcgtctcataccggacgacatattaatctttttattagtaggcatctttttagatggtttctttttcccagcattaactgagtcgatacctagaagatcgtgattgatctctccgaccattccacgaacttctaattggccgtctctaacggtaccataaactattttaccagcattagtaacagcttggacaatctgaccatccatcgcattgtacgatgtagtagtaactgttgttctacgtctaggagcaccagaagtatttttggagcccttggaggctgatgtagaagaagacgaggattttgattttggtttacatgtaatacattttgaactctttgattttgtatcacatgcgccggcagtcacatctgtttgagaattaagattattgttgcctcctttgacggctgcatctccaccgatttgcgctagtagatttttaagctgtggtgtaatcttattaactgtttcgatataatcatcgtaactgcttctaacggctaaattttttttatccgccatttagaagctaaaaatatttttatttatacagaagatttaactagattatacaatgaactaatatgatccttttccagattatttacaaacttggtattttttggttctggaggaggcgaatttaaattcggacttggattcggattttgtgagttcttgatcttattatacatcgagtataggatggcgacggtaactgctacacaaataccgatcaacaaaagaataccaatcatttattgacaataacttcactattgatcaagtatgcaatatatcatcttttcactaaataagtagtaataatgattcaacaatgtcgagatatatggacgataataatttagttcatggaaatatcgctatgattggtatgaatgactccgctaactctgtggggcgcgcagtgctttccccacatagaataaattagcattccgactgtgataataataccaagtataaacgccataatactcaatactttccatgtacgagtgggactggtagacttactaaagtcaataaaggcgaagatacacgaaagaatcaaaagaatgattccagcgattagcacgccggaaaaataatttccaatcataagcatcatgtccatttaactaataaaaattttaaatcgccgaatgaacaaagtggaatataaaccatataaaaacaatagtttgtactgcaaaaataatatctatttttgttttcgaagatatggtaaaattaaatagtagtacacagcatgttataactaacagcagcaacggctcgtaattacttatcatttactagacgaaaaggtggtgggatattttcttgctcaaataatacgaatatatcacccatccattttatgcgatgtttatatactctaatctttaatagatctatagacgacgggtttaccaacaatatagattttatcgattcatctaatttaaacccttccttaaacgtgaatgatctattatctggcataacgatgaccctacctgatgaatcggacaatgtactgggccatgtagaataaattatcaacgaattatcgtctacgaacatttatatcatttgttttaattttaggacgcgaataaatagatataaaatagaaaataacagatattacaaccagtgttatggccgcgcccaaccaggtaggcagttttattttatcttttactacaggttctcctggatgtacgtcaccaacggcggacgtagttctagtacaattagacgtaagttccgcttgggaattttttaacgctaaagagttaacgttaatcgtgcacccaacgtatttacatctagttctttgaacatcttgattataatataaccattttctatctctagattcgtcggtgcactcatgtaaccaacataccctaggtcctaaatatttatctccggaattagattttggataattcgcgcaccaacaatttctatttcctttatgatcgttacaaaagacgtataatgccgtatccccaaaagtaaaataatcaggacgaataattctaataaactcagaacaatatctcgcatccatatgtttggagcaaatatcggaataagtagacatagccggtttccgttttgcacgtaaccattctaaacaattggggtttccaggatcgtttctacaaaatccagtcatgaaatcgtcacaatgttctgtcttgtaattattattaaatatttttggacagtgtttggtatttgtcttagaacaacattttgccacgctatcactatcgcccaggagataatccttttttataaaatgacatcgttgcccggatgctatataatcagtagcgtgttttaaatccttaatatattcaggagttacctcgttctgataatagattaatgatccaggacgaaatttgaaagaactacatggttctccatgaattaatacatattgtttagcaaattcaggaactataaaactactacaatgatctatcgacataccatctatcaaacaaaacttgggtttaatttctcccggagatgtttcataatagtacgtataactttcttctgcaaacttaacagctctattatattcaggataattaaaacctaattccatatatttgtctcgtatatctgctattcctggtgctattttgattctattaagagtaacagctgcccccattcttaataatcgtcagtatttaaactgttaaatgttggtatatcaacatctaccttatttcccgcagtataaggtttgttgcaggtatactgttcaggaatggttacatttatacttcttctatagtcctgtctttcgatgttcatcacatatgcaaagaacagaataaacaaaataatgtaagaaataatattaaatatctgtgaattcgtaaatacattgattgccataataattacagcagctacaatacacacaatagacattcccacagtgttgccattacctccacgatacatttgagttactaagcaataggtaataactaagctagtaagaggcaatagaaaagatgagataaatatcatcaatatagagattagaggagggctatatagagccaagacgaacaaaatcaaaccgagtaacgttctaacatcattatttttgaagattcccaaataatcattcattcctccataatcgttttgcatcatacctccatctttaggcataaacgattgctgctgttcctctgtaaataaatctttatcaagcactccagcacccgcagagaagtcgtcaagcatattgtaatatcttaaataactcatttatatattaaaaaatgtcactattaaagatggagtataatctttatgccgaactaaaaaaaatgacttgtggtcaacccctaagtctttttaacgaagacggggatttcgtagaagttgaaccgggatcatcctttaagtttctgatacctaagggattttacgcctctccttccgtaaagacgagtctagtatttgaaacattaacaacgaccgataataaaatcactagtatcaatccaacaaatgcgccaaagttatatcctcttcaacgcaaagtcgtatctgaagtagtttctaatatgaggaaaatgatcgaatcaaaacgtcctctatacattactcttcacttggcgtgtggatttggtaagactattaccacgtgttatcttatggctacacacggtagaaaaaccgtcatttgcgtacccaataaaatgttaatacatcaatggaagacacaggtagaggcagtcggattggaacataagatatccatagatggagtaagtagtctattaaaggaactaaagactcaaagtccggatgtattaatagtagtcagtagacatctgacaaacgatgccttttgtaaatatatcaataagcattatgatttgttcatcttggatgaatcacatacgtataatctgatgaacaatacagcagttacaagatttttagcgtattatcctccgatgatgtgttattttttaactgctacacctagaccagctaaccgaatttattgtaacagtattattaatattgccaagttatccgatctaaaaaaaactatctatgcggtagatagtttttttgagccatattccacagacaatattagacatatggtaaaacgactagatggaccatctaataaatatcatatatataccgagaagttattatctgtagacgagcctagaaatcaacttattcttaataccctggtagaagaattcaagtcaggaactattaatcgcattttagttattactaaactacgtgaacatatggtattattctacaaacgattattagatcttttcggaccagaggttgtatttataggagacgcccaaaatagacgtactccagatatggtcaaatcaatcaaggaactaaatagatttatattcgtatccaccttattttattccggtactggtttagatattcctagtttggattcgttgttcatttgctcggcagtaatcaacaatatgcaaatagagcaattactagggagggtatgtcgagaaacagaactattagataggacggtatatgtatttcctaacacatccatcaaagaaataaagtacatgataggaaatttcatgcaacgaattattagtctgtctgtagataaactaggatttaaacaagaaagttatcggaaacatcaagaatccgatcccacttctgtatgtacaacatcctccagagaagaacgtgtattaaatagaatatttaactcgcaaaatcgttaagaagtttaagcgacgatccgcatgctgcgcaggccagtgtattacccctcatagtattaatataatccaatgatacttttgtgatgtcggaaatcttaaccaatttagactgacaggcagaacacgtcatgcaatcatcatcgtcatcgataactgtagtcttgggcttctttttgcggctcttcattccggaacgcacattggtgctatccatttaggtagtaaaaaataagtcagaatatgccctataacacgatcgtgcaaaacctggtatatcgtctctatctttatcacaatatagtgtatcgacatctttattattattgacctcgtttatcttggaacatggaatgggaacatttttgttatcaacggccacctttgccttaattccagatgttgtaaaattataactaaacagtctatcatcgacacaaatgaaattcttgtttagacgtttgtagtttacgtatgcggctcgttcgcgtctcattttttcagatattgcaggtactataatattaaaaataagaatgaaataacataggattaaaaataaagttatcatgacttctagcgctgatttaactaacttaaaagaattacttagtctgtacaaaagtttgaaattttcagattctgcggctatagaaaagtataattctttggtagaatggggaacatctacttactggaaaataggcgtgcaaaaggtagctaatgtcgagacgtcaatatctgattattatgatgaggtaaaaaataaaccgtttaatattgatccgggctattacattttcttaccggtatattttgggagcgtctttatttattcgaagggtaaaaatatggtagaacttggatctggaaactcttttcaaataccagatgatatgcgaagtgcgtgtaacaaagtattagacagcgataacggaatagactttctgagatttgttttgttaaacaatagatggataatggaagatgctatatcaaaatatcagtctccagttaatatatttaaactagctagtgagtacggattaaacatacccaaatatttagaaattgaaatagaggaagacacattatttgacgacgagttatactctattatagaacgctcttttgatgataaatttccaaaaatatccatatcgtatattaagttgggagaacttaggcggcaagttgtagactttttcaaattctcgttcatgtatattgagtccatcaaggtagatcgtataggagataatatttttattcctagcgttataacaaaatcaggaaaaaagatattagtaaaagatgtagaccatttaatacgatctaaggttagagaacatacatttgtaaaagtaaaaaagaaaaacacattttccattttatacgactatgatgggaacggaacagaaactagaggagaagtaataaaacgaattatagacactataggacgagactattatgttaacggaaagtatttctctaaggttggtagtgcaggcttaaagcaattgactaataaattagatattaatgagtgcgcaactgtcgatgagttagttgatgagattaataaatccggaactgtaaaacgaaaaataaaaaaccaatcagcatttgatttaagcagagaatgtttgggatatccagaagcagattttataacgttagttaataacatgcggttcaaaatagaaaattgtaaggttgtaaatttcaatattgaaaatactaattgtttaaataacccgagtattgaaactatatatggaaactttaaccagttcgtctcaatctttaatatcgtcaccgatgtcaaaaaaagattattcgagtgaaataatatgcgcctttgatataggtgcaaaaaatcctgccagaactgttttagaagtcaaggataactccgttagggtattggatatatcaaaattagactggagttctgattgggaaaggcgcatagctaaagatttgtcacaatatgaatacactacagttcttctagaacgtcagcctagaaggtcgccgtatgttaaatttatctattttattaaaggctttttatatcatacatcggctgccaaagttatttgcgtctcgcctgtcatgtctggtaattcatatagagatcgaaaaaagagatcggtcgaagcatttcttgattggatggacacattcggattgcgagactccgttccggatagacgcaaattagacgatgtagcggatagtttcaatttggctatgagatacgtattagataaatggaatactaattatacaccttataataggtgtaaatctagaaattacataaaaaaaatgtaataacgttagtaacgccattatggataatctatttacctttctacatgaaatagaagatagatatgccagaactatttttaactttcatctaataagttgcgatgaaataggagatatatatggtcttatgaaagaacgcatttcctcagaggatatgtttgataatatagtatataataaagatatacatcctgccattaagaaactagtgtattgcgacatccaacttactaaacacattattaatcagaatacgtatccggtatttaacgattcttcacaagtgaaatgttgtcattatttcgacataaactcagataatagcaatattagctctcgtacagtagagatatttgagagggaaaagtcatctcttgtatcatatattaaaactaccaataagaagagaaaggtcaattacggcgaaataaagaaaactgttcatggaggcactaatgcaaattacttttccggtaaaaagtctgacgagtatctgagtactacagttagatccaacattaatcaaccttggatcaaaaccatttctaagagaatgagagtagatatcattaatcactctatagtaacgcgtggaaaaagctctatattacaaactatagaaattatttttactaatagaacatgtgtgaaaatattcaaggattctactatgcacattattctatccaaggacaaggatgaaaaggggtgtatacacatgattgacaaattattctatgtctattataatttatttctgttgttcgaagatatcatccaaaacgagtactttaaagaagtagctaatgttgtaaaccacgtacttacggctacggcattagatgagaaattattcctaattaagaaaatggctgaacacgatgtttatggagttagcaatttcaaaatagggatgtttaacctgacatttattaagtcgttggatcataccgttttcccctctctgttagatgaggatagcaaaataaagttttttaaggggaaaaagctcaatattgtagcattacgatctctggaggattgtataaattacgtgactaaatccgagaatatgatagaaatgatgaaggaaagatcgactattttaaatagcatagatatagaaacggaatcggtagatcgtctaaaagaattgcttctaaaatgaaaaaaaacactgattcagaaatggatcaacgactagggtataagtttttggtgcctgatcctaaagccggagttttttatagaccgttacatttccaatatgtatcgtattctaattttatattgcatcgattgcatgaaatcttgaccgtcaagcggccactcttatcgtttaagaataatacagaacgaattatgatagaaattagcaatgttaaagtgactcctccagattactcacctataatcgcgagtattaaaggtaagagttatgatgcattagccacgttcactgtaaatatctttaaagaggtaatgaccaaagagggtatatccatcactaaaataagtagttatgagggaaaagattctcatttgataaaaattccgctactaataggatacgggaataaaaatccacttgatacagccaagtatcttgttcctaatgtcataggtggagtctttatcaataaacaatctgtcgaaaaagtaggaattaatctagtagaaaagattacaacatggccaaaatttagggttgttaagccaaactcattcactttctcgttttcctccgtatcccctcctaatgtattaccgacaagatatcgccattacaagatatctctggatatatcacaattggaagcgttgaatatatcatcgacaaagacatttataacggtcaatattgttttgctgtctcaatatttatctagagtgagtctagaattcattagacgtagtttatcatacgatatgcctccagaagttgtctatctagtaaacgcgataatagatagtgctaaacgaattactgaatctattactgactttaatattgatacatacattaatgacctggtggaagctgaacacattaaacaaaaatctcagttaacgatcaacgagttcaaatatgaaatgctgcataactttttacctcatatgaactatacacccgatcaactaaagggattttatatgatatctttactaagaaagtttctctactgtatctaccacacttctagatatccagatagagattcgatggtttgtcatcgcatcctaacgtacggcaaatattttgagacgttggcacatgatgaattagagaattacataggcaacatccgaaacgatatcatgaacaatcacaagaacagaggcacttacgcggtaaacattcatgtactaacaactcccggacttaatcacgcgttttctagcttattgagtggaaagttcaaaaagtcagacggtagttatcgaacacatcctcactattcatggatgcagaatatttctattcctaggagtgttggattttatccggatcaagtaaagatttcaaagatgttttctgtcagaaaataccatccaagtcaatatctttacttttgttcatcggacgttccggaaagaggtcctcaggtaggtttagtatctcaattgtctgtcttgagttccattacaaatatactaacgtctgagtatttggatttggaaaagaaaatttgtgagtatatcagatcatattataaagatgatataagttactttgaaacaggatttccaatcactatagaaaatgctctagtcgcatctcttaatccaaatatgatatgtgattttgtaactgactttagacgtagaaaacggatgggattcttcggtaacttggaggtaggtattactttagttagggatcacatgaatgaaattcgcattaatattggagcgggaagattagtcagaccattcttggttgtggataacggagagctcatgatggatgtgtgtccggagttagaaagcagattagacgacatgacattctctgacattcagaaagagtttccgcatgtcatcgaaatggtagatatagaacaatttacttttagtaacgtatgtgaatcggttcaaaaatttagaatgatgtcaaaggatgaaagaaagcaatacgatttatgtgactttcctgccgaatttagagatggatatgtggcatcttcattagtgggaatcaatcacaattctggacccagagctattcttggatgtgctcaagctaaacaagctatctcttgtctgagttcggatatacgaaataaaatagacaatggaattcatttgatgtatccagagaggccaatcgtgattagtaaggctttagaaacttcaaagattgcggctaattgcttcggccaacatgttactatagcattaatgtcgtacaaaggtatcaatcaagaggatggaattatcatcaaaaaacaatttattcagagaggcggtctcgatatagttaccgcaaagaaacatcaagtagaaattccgttggaaaactttaataacaaagaaagagataggtctaacgcctattcaaaattagaaagtaatggattagttagactgaatgctttcttggaatccggagacgctatggcacgaaatatctcatcaagaactcttgaagatgattttgctagagataatcagattagcttcgatgtttccgagaaatataccgatatgtacaaatctcgcgttgaacgagtacaagtagaacttactgacaaagttaaggtacgagtattaaccatgaaagaaagaagacccattctaggagataaatttaccactagaacgagtcaaaagggaacagtcgcgtatgtcgcggatgaaacggaacttccatacgacgaaaatggtatcacaccagatgtcattattaattctacatccatcttctctagaaaaactatatctatgttgatagaggttattttaacagccgcatattctgctaagccgtacaacaataagggagaaaaccgacctgtctgttttcctagtagtaacgaaacatccatcgatacatatatgcaattcgctaaacaatgttatgagcattcaaatccgaaattgtccgatgaagaattatcggataaaatcttttgtgaaaagattctctatgatcctgaaacggataagccttatgcatccaaagtattttttggaccaatttattacttgcgtctgaggcatttaactcaggacaaggcaaccgttagatgtagaggtaaaaagacgaagctcattagacaggcgaatgagggacgaaaacgtggaggaggtatcaagttcggagaaatggagagagactgtttaatagcgcatggcgcagccaatactattacagaagttttaaaagactcagaagaggattatcaagatgtgtatgtttgtgaaaattgtggagacatagcagcacaaatcaagggtattaatacatgtcttagatgttcaaaacttaatctctctcctctcttaacaaaaattgataccacgcacgtatctaaagtatttcttactcaaatgaacgccagaggcgtaaaagtcaaattagatttcgaacgaaggcctccttcgttttataaaccattagataaagttgatctcaagccgtcttttctggtgtaatattctagtttggtagtagatacatatcaatatcatcaaattcgagatccgaattataaaatgggcgtggattgttaactatagaatcggacgtctgatattcgaaaatctgtggagttttaggttttggtggaggtgtaactgctacttgggatactgaagtctgatattcagaaagctgggggatgttctggttcgacatccaccgatggtgtcacatcactaatcggttcggtaacgtctgtggatggaggtgctacttctacagaacctgtagcctcagttgtcaacggagatacatttttaatgcgaggaaatgtataatttggtaatggtttctcatgtggatctgaagaagaggtaagatatctactagaaagataccgatcacgttctagttctcttttgtagaacttaactttttctttctcagcatctagttgatattccaacctcttcacgttactacgttcagattccaattcacgttcgcatgggttacctccgcagtttttacgagcgatttcacgttcagccttcatgcgtctctccttctctctatcgagtttatcagagcagtctttctgaaggcgatcgaactccataaatttctccaacgctttgattgtttccatagatttccgaagttcagcttttaggactgtgattctttttctttcgaattcacagctggatgtgcaaccgtttccattaccgccatctctaagtttcttttctagatcggcaacatttcatccccatgccttttacattcctcgagtctactgtcgtcgaaatatcgttccagctccttttcgacatcaataactttagcacgttgtctctcaagctctcttttgtagttatctgattccctggcacgtttaagatcttcatgcaattgagtcagctcttaacacaatctcttgcttcttcgtcatagtacttacaatcactatgggatccattgttaccacgtctacactcggcgagctcgcgtttaagagattcaatttcccgtttgtattggtccatgtttccattgctaccaccattagatttacaggctgctagttgtcgttcgagatcagaaatacgggttttcttggaattgatttcgtcgatgtacttggcatcgaaacacttattaagttctttttccaattctacgattttatttctttcgcgagtcaattccctcctgtagtaactatctgttttgtcagattcacgctctctacgtagactttcttgcaagttactaatttgttccctagcacgtccgagtttagttttatatgctgaatagagttctgattcatcctttgagcagatctctagcgatcgtttaagattcctgattctagtctttagcctatttacctcctcagaagatgttccgttaccgttgcgtttacactcgttaagctgtctatcaagatccatgattctatctctaagacgttgcatctctctttccatatcagcattgctttcattattacgtctgcagtcactcaactgtctttcaatatctgagattctatctctaagacgtcgcatctctctctgtttcggcattggtttcattattacgtctacagtcgttcaactgtctttcaagatctgatattctagattggagtctgctaatctctgtagcattttcacggcattcactcagttgtctttcaagatctgagattttagattggagtctgctaatctctgtaagatttcctcctccgctctcgatgcagtcggtcaacttattctctagttctctaatacgcgaacgcagtgcatcaacttcttgcgtgtcttcctggttgcgtgtacattcatcgagtctagattcgagatctctaacgcgtcgtcgttcttcctcaagttctctgcgtactacagaaagcgtgtccctatcttgttgatatttagcaatttctgattctagagtactgattttgcttacgtagttactaatagttgtcttggccttatcaagatcctccttgtatttgtcgcattccttgatatccctacgaagtctggacagttcccattcgacattacgacgtttatcgatttcagctcggagatcgtcatcgcgttgttttagccacatacgactgagttcaagttctcgttgacaagatccatctacttttccattcctaatagtatccagttccttttctagttctgaacgcatttctcgttccctatcaagcgattctctcaattctcggatagtcttcttatcaatttctaataaatctgaaccatcatctgtcccattttgaatatccctgtgttctttgatctcttttgtaagtcggtcgattctttcggttttataaacagaatccctttccaaagtcctaatcttactgagtttatcactaagttctgcattcaattcggtgagttttctcttggcttcttccaactctgttttaaactctccactatttccgcattcttcctcgcatttatctaaccattcaattagtttattaataactagttggtaatcagcgattcctatagccgttcttgtaattgtgggaacataattaggatcttctaatggattgtatggcttgatagcatcatctttatcattattagggggatggacaaccttaattggttggtcctcatctcctccagtagcgtgtggttcttcaataccagtgttagtaataggcttaggcaaatgcttgtcgtacgcgggcacttcctcatccatcaagtatttataatcgggttctacgtctgaatattcttttctaagagacgcgacttcgggagttagtagaagaactctgtttctgtatctatcaacgctggaatcaatactcaagttaaggatagcgaatacctcatcgtcatcatccgtatcttctgaaacaccatcatatgacatttcatgaagtctaacgtattgataaatagaatcagatttagtattaaacagatccttaacctttttagtaaacgcatatgtatattttagatctccagatttcataatatgatcacatgccttaaatgtcagtgcttccatgatataatctggaacactaatgggtgacgaaaaagatacagcaccatatgctacgttgataaataaatctgaaccactaagtagataatgattaatgttaaggaagaggaaatattcagtatatagatatgccttagcatcatatcttgtactaaacacgctaaacagtttattgatgtgatcaatttccaacagaataattagagcagcgggaataccaacaaacatattaccacatccgtattttctatgaatatcacatatcatgttaaaaaatcttgatagaagagcgaatatctcgtctgacttaatgagtcgtagttcagcagcaacataagtcataactgtaaatagaacatactttcctgtagtgttgattctagactccacatcaacaccattattaaaaatagttttatatacatctttaatctgctctccgttaatcgtcgaacgttctagtatacggaaacactttgatttcttatctgtagttaatgacttagtgatatcacgaagaatattacgaattacatttcttgtttttcttgagagacctgattcagaactcaactcatcgttccatagtttttttacctcagtggcgaaatctttggagtgcttggtacatttttcaataaggttcgtgacctccatttattataaaaaattttattcaaaacttaactacaatcgggtaattataaaatcgtagatctcccatgtggtggaatactaccatctatcgcatgtggatggacagtaggtaatggccatgggaacagtaatgtttgcatatttatctttcttgccagtattactgcatattgtcccaatgtttcgatgtgatgttctaacctatcaactgccgctgtatcacaacaatagtgtccgatgaaattaagattatgatccaatgtgtttaatatatgattatcaagtcttatacgatccgcgtcttttttgacaggatcaggttcttctacaggaagaagtttcggcctcttatgatattcatgtctgggaaacggtggtctagggtgaggctccggtatcggagtgggttttggattataatcatcatcgtctatgacatcatcttcgacttcgatatttattttgctatcttgatgatgtcctgtatcagttgcattttcagcactcgactgaatattagcgcattcattgtctattattaccatatttctaaacccaaaatgtatgtgttgaacatcagtactatcgttgatgagtcttatagcatgaattcgcttatcgttatcgggtttatcttctgtcaccttagcaattccttttttattaaactctacataatcatatccatttctattgtttgttctaatataaacgagtatagcatcattgctaaatttttcaatagtatcgaaaacagaatatcctaaaccatataatatatattcagggacactcaaactaaatgtccaggattctcctaaatacgtaaactttaatagtgcgaaatcattcaaaaatctaccacttatagatagatagtacataaatgcgtatagtagtctacctatctctttattatgaaaaccggcattacgatcatatatgtcgtgatatacctgtgatccgtttacgttaaaccataaatacatgggtgatcctataaacatgaatttatttctaattctcagagctatagttaattgaccgtgtaatatttgcttacatgcatacttgatacgctcattaataaaatttttatcattgctcgttatctcagaatcgtatatataaggagtaccatcgtgattcttaccagatattatacaaaatactatatataaaatatattgaccaacgttagtaatcatataaatgtttaacgttttaaattttgtattcaatgatccattatcatacgctagcatggtcttatgatattcattctttaaaatataatattgtgttagccattgcattggggctcctaatggagattttttattctcatccattttaggataggctttcataaagtccctaataacttcgtgaataatgtttctatgttttctactgatgcatgtatttgcttcgatttttttatcccatgtttcatctatcatagatttaaacgcagtaatgctcgcaacattaacatcttgaaccgttggtacaattccgttccataaatttataatgttcgccatttatataactcattttttgaatatacttttaattaacaaaagagttaagttactcatatgggcgccgtccagtctgaacatcaatctttttagccagagatatcatagccgctcttagagtttcagcgtgattttccaacctaaatagaacttcatcgttgcgtttacaacacttttctatttgttcaaactttgttgttacattagtaatctttttttccaaattagttagccgttgtttgagagtttcctcattgtcgtcttcatcggctttaacaattgcttcgcgtttagcctctggctttttagcagcctttgtagaaaaaaattcagttgctggaattgcaagatcgtcatctccggggaaaagagttccgtccatttaaagtacagattttagaaactgacactctgcgttatttatatttggtacaacacatggattataaatatcgatgttaataacatcagaaaatgtaaagtctatacattgttgcatcgtgttaaattttctaatggatctagtattattgggtccaacttctgcctgaaatccaaatatggaagcggatacaaaaccgtttcctggataaaccacacatctccacttttgctttacatcagaaattgtgtcgttgacatcttgaactctcctatctaatgccggtgttccacctatagattttgaatattcgaatgctgcatgagtagcattaaattccttaatattgccataattttcatatattgagtaaccctggataaaaagtaaacacaccgcagccgtcgctaccacaataaaaaaaattgatagagagttcatttataatctattagaagctgacaaaatttttttacacgcatcagacaatgctttaataaatagttcaacatctacttttgtcatatcgaaccgatggtatgattctaacctagaattacatccgaaaaagttgactatgttcatagtcattaagtcattaacaaacaacattccagactctggattataagacgatactgtttcgtcacaattacctaccttaatcatgtgattatgaatattggctattagagcaccttctaagaaatctataatatctttgaaacacgatttaaaatcaaaccacgaatatacttctacgaagaaagttagtttacccataggagaaataactataaatggagatctaaatacaaaatccggatctatgatagttttaacattattatattctctattaaatacctccacatctaaaaatgttaattttgaaactatgtcttcgtttattaccgtacctgaactaaacgctataagctctattgtttgagaactctttaaacgatattcttgaaatacatgtaacaaagtttcctttaactcggtcggtttatctaccatagttacagaatttgtatccttatctataatataataatcaaaatcgtataaagttatataattatcgcgttcagattgggatcttttcaaatagactaaaaaccccatttctctagtaagtatcttatgtatatgtttgtaaaatatcttcatggtgggaatatgctctaccgcagttagccattcctcattgacagcggtagatgtattagacaaaactattccaatgtttaacaagggccattttacgagattattaaatccttgtttgataaatgtagccaatgagggttcgagttcaacgacgattgaattctcttcccgcggatgctgcatgatgaacgacgggatgttgttcgattgatttggaattctttttcgactttttgtttatattaaatattttaaaatttatagcggatagcaattcatgtaccacggataatgtagacgcgtattgcgcatcgatatctttattattagataaatttatcaataaatgtgagaagtttgcctcgttaaggtcttccatttaaatattatataaacatttgtgtttgtatcttattcgtcttttatggaatagttttttactagtaaagctgcaattacacactttgtccgtaaaacataaatataaacaccagcttttatcaatcgttccaaaaagtcgacggcggacatttttaacatggcatctattttaaatacacttaggtttttggaaaaaacatcattttataattgtaacgattcaataactaaagaaaagattaagattaaacataagggaatgtcatttgtattttataagccaaagcattctaccgttgttaaatacttgtctggaggaggtatatatcatgatgatttggttgtattggggaaggtaacaattaataatctaaagatgatgctattttacatggatttatcatatcatggagtgacaagtagtggagcaatttacaaattgggatcgtctatcgatagactttctctaaataggactattgttacaaaagttaataattatgatgatacattttttgacgacgatgattgatcgctattgcacaattttgtttttttactttctaatatagcgtttagattctttttcatgtgcgaatattgatttactaaaatatcgatgtttaacttttgttctatgacgtccttatcagcggtatcggtacatatacgtaattcaccttcacaaaatacggagtcttcgataataatagccaatcgattattggatctagctgtctgtatcatattcaacatgtttaatatatcctttcgtttcccctttacaggcatcgatcgtagcatattttccgcgtctgagatggaaatgttaaaactacaaaaatgcgtaatgttagcccgtcctaatattggtacgtgtctataagtttggcatagtagaataatagacgtgtttaaatgccttccaaagtttaagaattctattagagtattgcattttgatagtttatcacctacatcatcaaaaataagtaaaaagtgtgctgattttttatgattttgtgcgacagcaatacatttttctatgttacttttagttcgtatcagattatattctagagattcctgactactaacgaaattaatatgatttggccaaatgtatccatcataatctgggttataaacgggtgtaaacaagaatatatgtttatattttttaactagtgtagaaaacagagatagtaaatagatagtttttccagatccagatcctcccgttaaaaccattctaaacggcatttttaataaattttctcttgaaaattgtttttcttggaaacaattcataattatatttacagttactaaattaatttgataataaatcaaaatatggaaaactaaggtcgttagtagggaggagaacaaagaaggcacatcgtgacataaataacatttattatcatgatgacaccagaaaacgacgaagagcagacatctgtgttctccgctactgtttacggagacaaaattcaaggaaagaataaacgcaaacgcgtgattggtctatgtattagaatatctatggttatttcactactatctatgattaccatgtccgcgtttctcatagtgcgcctaaatcaatgcatgtctgctaacgaggctgctattactgacgccgctgttgccgttgctgctgcatcatctactcatagaaaggttgcgtctagcactacacaatatgatcacaaagaaagctgtaatggtttatattaccagggttcttgttatatattacattcagactaccagttattctcggatgctaaagcaaattgcactgcggaatcatcaacactacccaataaatccgatgtcttgattacctggctcattgattatgttgaggatacatggggatctgatggtaatccaattacaaaaactacatccgattatcaagattctgatgtatcacaagaagttagaaagtatttttgtgttaaaacaatgaactaatatttatttttgtacattaataaatgaaatcgcttaatagacaaactgtaagtaggtttaagaagttgtcggtgccggccgctataatgatgatactctcaaccattattagtggcataggaacatttctgcattacaaagaagaactgatgcctagtgcttgcgccaatggatggatacaatacgataaacattgttatttagatactaacattaaaatgtctacagataatgcggtttatcagtgtcgtaaattacgagccagattgcctagaccggatactagacatctgagagtattgtttagtattttttataaagattattgggtaagtttaaaaaagaccaatgataaatggttagatattaataatgataaagatatagatattagtaaattaacaaattttaaacaactaaacagtacgacggatgctgaagcgtgttatatatacaagtctggaaaactggttaaaacagtatgtaaaagtactcaatctgtactatgtgttaaaaaattctacaagtgacaacaaaaaatgaattaataataagtcgttaacgtacgccgccatggacgccgcgtttgttattactccaatgggtgtgttgactataacagatacattgtatgatgatctcgatatctcaatcatggactttataggaccatacattataggtaacataaaaactgtccaaatagatgtacgggatataaaatattccgacatgcaaaaatgctactttagctataagggtaaaatagttcctcaggattctaatgatttggctagattcaacatttatagcatttgtgccgcatacagatcaaaaaataccatcatcatagcatgcgactatgatatcatgttagatatagaagataaacatcagccattttatctattcccatctattgatgtttttaacgctacaatcatagaagcgtataacctgtatacagctggagattatcatctaatcatcaatccttcagataatctgaaaatgaaattgttgtttaattcttcattctgcatatcagacggcaatggatggatcataattgatgggaaatgcaatagtaattttttatcataaaagttgtaaagtaaataataaaacaataaatattgaactagtagtacgtatattgagcaatcagaaatgatgctggtacctcttatcacggtgaccgtagttgcgggaacaatattagtatgttatatattatatatttgtaggaaaaagatacgtactgtctataatgacaataaaattatcatgacaaaattaaaaaagataaagagttctaattccagcaaatctagtaaatcaactgatagcgaatcagactgggaggatcactgtagtgctatggaacaaaacaatgacgtagataatatttctaggaatgagatattggacgatgatagcttcgctggtagtttaatatgggataacgaatccaatgtcatggcgcctagcacagaacacatttacgatagtgttgctggaagcacgctgctaataaataatgatcgtaatgaacagactatttatcagaacactacagtagtaattaatgagacggagactgttgaagtacttaatgaagataccaaacagaatcctaactattcatccaatcctttcgtaaattataataaaaccagtatttgtagcaagtcaaatccgttcattacagaactcaacaataaatttagtgagaataatccgtttagacgagcacatagcgatgattatcttaataagcaagaacaagatcatgaacacgatgatatagaatcatcggtcgtatcattggtgtgattagtttcctttttataaaattgaagtaatatttagtattattgctgccgtcacgttgtacaaatggagatattccctgtattcggcatttctaaaattagcaattttattgctaataatgactgtagatattatatagatacagaacatcaaaaaattatatctgatgagatcaatagacagatggatgaaacggtacttcttaccaacatcttaagcgtagaagttgtaaatgacaatgagatgtaccatcttattccccatagactatcgactattatactctgtattagttctgtcggaggatgtgttatctctatagataatgacatcaatgacaaaaatattctaacatttcccattgatcatgctgtaatcatatccccactgagtaaatgtgtcgtagttagcaagggtcctacaaccatattggttgttaaagcggatatacccagcaaacgattggtaacatcgtttacaaacgacatactgtatgtaaacaatctgtcactgattaattatttgccgttgtctgtattcattattagacgagtcaccgactatttggatagacacatatgcgatcagatatttgcgaataataagtggtattccattataaccatcgacgataagcaatatcctattccatcaaactgtataggtatgtcctctgccaagtacataaattctagcatcgagcaagatactttaatacatgtttgtaacctcgagcatccattcgacttagtatacaaaaaaatgcagtcgtacaattctgtacctatcaaggaacaaatattgtacggtagaattgataatataaatatgagcattagtatttctgtggattaatagatttctagtatggggatcattaatcatctctaatctctaaatacctcataaaacgaaaaaaaagctattatcaaatactgtacggaatggattcattctcttctctttttatgaaactctgttgtatatctactgataaaactggaagcaaaaaatctgataaaaagaataagaataagatcaaggattatatggaacacgattattataaaataacaatagttcctggttcctcttccacgtctactagctcgtggtattatacacatgcctagtaatagtctctttgcgttgacggaaagcagactagaaataacaggctaaaatgttcagacaccataatagttcccaacccagataataacagagtaccatcaacacattcctttaaactcaatcccaaacccaaaaccgttaaaatgtatccggccaattgatagtagataatgaggtgtacagcgcatgataatttacacagtaaccaaaatgaaaatactttagtaattataagaaatatagatggtaacgtcatcatcaacaatccaataatatgccggagagtaaacattgacggataaaacaaaaatgctccgcataactctatcatggcaataacacaaccaaatacttgtaagattcctaaattagtagaaaatacaacggatatcgatgtataagtgatctcgagaaataataagaataaagtaatgcccgtaaagataaacatcaacattgtttggtaatcattaaaccaattagtatgaagttgaactaatttcacagtagattttattccagtgttatcctcgcatgtatacgtacctggtaagatatctttatattctataatcaatgagacatcactatccgataacgaatgaagtctagcactagtatgccatttacttaatatggtcgtcttggaagttttattataagttaaaatatcatggttgtccaatttccatctaatatactttgtcggattatctatagtacacggaataatgatggtattattacatgctgtatactctatagtctttgtagatgttataatcataaaagtacagaggtatatcaacgatattctaactcttgacattttttatttatttaaaatgatacctttgttatttattttattctattttgctaacggtatcgaatggcataagtttgaaacgagtgaagaaataatttctacttacttattagacgacgtattatacacgggtgttaatggggcggtatacacattttcaaataataaactaaacaaaactggtttagctaatactaattatatcacaacatctataaaagtagaggatgcggataaggatacattagtatgcggaaccaataacggaaatcccaaatgttggaaaatagacggttcagacgacccaaaacatagaggtagaggatacgctccttatcaaaatagcaaagtaacgataatcagtcacaacggatgtgtactatctgacataaacatatcaaaagaaggaattaaacgatggagaagatttgacggaccatgtggttatgatttatacacggcggataacgtaattccaaaagatggtttacgaggagcattcgtcgataaagatggtacttatgacaaagtttacattcttttcactgatactatcggctcaaagagaattgtcaaaattccgtatatagcacaaatgtgcctaaacgacgaaggtggtccatcatcattgtctagtcatagatggtcgacgtttctcaaagtcgaattagaatgtgatatcgacggaagaagttatagacaaattattcattctagaactataaaaacagataatgatacgatactatatgtattcttcgatagtccgcattatgtacctattctatgaataccattaaacaatctttttctacgtcaaaattggaaggatatacaaagcaattgccgtctccagctcctggtatatgtctaccagctggaaaagttgttccacataccacgtttgaagtcatagaaaaatataatgtactagatgatattataaagcctttatctaaccaacctatcttcgaaggaccgtctggtgttaaatggttcgatataaaggagaaggaaaatgaacatcgggaatatagaatatacttcataaaagaaaattctatatattcgttcgatacaaaatctaaacaaactcgtagctcgcaagtcgatgcgcgactattttcagtaatggtaacttcgaaaccgttatttatagcagatatagggataggagtaggaatgccacaaatgaaaaaaatacttaaaatgtaatcttaatcgagtacaccacacgacaatgaacaaacataagacagattatgctggttatgcttgctgcgtaatatgcggtctaattgttggaattatttttacagcgacactattaaaagttgtagaacgtaaattagttcatacaccatcaatagataaaacgataaaagatgcatatattagagaagattgtcctactgactggataagctataataataaatgtatccatttatctactgatcgaaaaacctgggaggaaggacgtaatgcatgcaaagctctaaatccaaattcggatctaattaagatagagactccaaacgagttaagttttttaagaagcattagacgcggatattgggtaggagaatccgaaatattaaaccagacaaccccatataattttatagctaagaatgccacgaagaatggaactaaaaaacggaaatatatttgtagcacaacgaatactcccaaactgcattcgtgttacactatataacaattacactacatttttatcataccactacttcggttagatgttttagaaaaaaataaatatcgccgtaccgttcttgtttttataaaaataacaattaacaattatcaaattttttctttaatattttacgtggttgaccattcttggtggtaaaataatctcttagtgttggaatggaatgctgtttaatgtttccacactcatcgtatattttgacgtatgtagtcacatcgtttacgcaatagtcagactgtagttctatcatgcttcctacattagaaggaggaacagttttaaagtctcttggttttaatctattaccgttagttttcatgaaatcctttgttttatccacttcacattttaaataaatgtccactatacattcttctgttaattttactagatcgtcatgggtcatagaatttataggttccgtagtccatggatccaaactagcaaacttcgcgtatacggtatcgcgattagtgtatacaccaactgtatgaaaattaagaaaacagtttaatagatcaacagaaatatttaatcctccgtttgatacagatgcaccatatttatggattttggattcacacgttgtttgtctgaggggttcgtctagcgttgcttctacataaacttctattcccatatattctttattgtcagaatcgcataccgatttatcatcatacactgtttgaaaactaaatggtatacacatcaaaataacaaatactaacgagtacattctgcaatattgttatcgtaattggaaaaatagtgttcgagtgagttggattatgtgagtattggattgtatattttattttatattttgtaataagaataaaatgctaatgtcaagtttattccaatagatgtcttattaaaaacatatataataaataacaatggctgaatggcataaaattatcgaggatatctcaaaaaataataagttcgaggatgccgccatcgttgattacaagactacaaagaatgttctagctgctattcctaacagaacatttgccaagattaatccgggtgaaattattcctctcatcactaatcgtaatattctaaaacctcttattggtcagaaatattgtattgtatatactaactctctaatggatgagaacacgtatgctatggagttgcttactgggtacgcccctgtatctccgatcgttatagcgagaactcataccgcacttatatttttgatgggtaagccaacaacatccagacgtgacgtgtatagaacgtgtagagatcacgctacccgtgtacgcgcaactggtaattaaaataaaaagtaatattcatatgtagtgtcaattttaaatgatgatgatgaaatggataatatccatattgacgatgtcaataatgccggtattggcatacagctcatcgatttttagatttcattcagaggatgtggaattatgttatgggcatttgtattttgataggatctataatgtagtaaatataaaatataatccgcatattccatatagatataattttattaatcgcacgttaaccgtagatgaactagacgataatgtcttttttacacatggttattttttaaaacacaaatatggttcacttaatcctagtttgattgtctcattatcaggaaacttaaaatataatgatatacaatgctcagtaaatgtatcgtgtctcattaaaaatttggcaacgagtacatctactatattaacatctaaacataagacttattctctacatcggtccacgtgtattactataataggatacgattctattatatggtataaagatataaatgacaagtataatggcatctatgattttactgcaatatgtatgctaatagcgtctacattgatagtgaccatatacgtgtttaaaaaaataaaaatgaactcttaattatgctatgctattagaaatggataaaatcaaaattacggttgattcaaaaattggtaatgttgttaccatatcgtataacttggaaaagataactattgatgtcacacctaaaaagaaaaaagaaaaggatgtattattagcgcaatcagttgctgtcgaagaggcaaaagatgtcaaggtagaagaaaaaaatattatcgatattgaagatgacgatgatatggatgtagaaagcgcataatacgatctataaaaataagtatataaatactttttatttactgtactcttactgtgtagtggtgataccctactcgattatttttttaaaaaaatacttattctgattcttctagccatttccgtgttcgttcgaatgccacatcgacgttaaagataggggagtagttgaaatctagttctgcattgttggtacgcacctcaaatgtagtgttggatatcttcaacgtatagttgttgagtagtgatggttttctaaatagaattctcttcatatcattcttgcacgcgtacatttttagcatccatcttggaattctagatccttgttctattcccaatggtttcatcaatagaagattaaacatatcgtacgaacacgatggagagtaatcgtagcaaaagtaagcatttcctttaatctcagatcccggatactggatatattttgcagccaacacgtgcatccatgcaacatttcctacatatacccggctatgcaccgcgtcatcatcgactgtacgatacataatgttaccgtgttgcttacattgctcgtaaaagactttcgtcaatttgtctccttctccgtaaattccagtgggtcttaggcaacaagtatacaattttgctccattcatgattacggaattattggctttcataaccagttgctcggccatacgtttactttttgcgtatacatgtcctggtgatatatcataaagggtatgctcatggccgatgaatggatcaccgtgtttatttggtcctattgcttccatgctactagtatagatcaaatacttgattcctaggtccacacaagctgccaatatagtctgtgttccataatagtttactttcatgatttcattatcggtgtattttccaaatacatccactagagcagccgtatgaataatcagatttaccccatctagcgcttctctcaccttatcaaagtcgtttatatcacattgtatatagtttataaccttaactttcgaggttattggttgtggatcttctacaatatctatgactctgatttcttgaacatcatctgcactaattaacagttttactatatacctgcctagaaatccggcaccaccagtaaccgcgtacacggccattgctgccactcataatatcagactacttattctattttactaaataatggctgtttgtataatagaccacgataatatcagaggagttatttactttgaaccagtccatggaaaagataaagttttaggatcagttattggattaaaatccggaacgtatagtttgataattcatcgttacggagatattagtcaaggatgtgattccataggcagtccagaaatatttatcggtaacatctttgtaaacagatatggtgtagcatatgtttatttagatacagatgtaaatatatctacaattattggaaaggcgttatctatttcaaaaaatgatcagagattagcgtgtggagttattggtatttcttacataaatgaaaagataatacattttcttacaattaacgagaatggcgtttgatatatcagttaatgcgtctaaaacaataaatgcattagtttacttttctactcagcaaaataaattagtcatacgtaatgaagttaatgatacacactacactgtcgaatttgatagggacaaagtagttgacacgtttatttcatataatagacataatgacaccatagagataagaggggtgcttccagaggaaactaatattggttgcgcggttaatacgccggttagtatgacttacttgtataataagtatagttttaaactgattttagcagaatatataagacacagaaatactatatccggcaatatttattcggcattgatgacactagatgatttggctattaaacagtatggagacattgatctattatttaatgagaaacttaaagtagactccgattcgggactatttgactttgtcaactttgtaaaggatatgatatgttgtgattctagaatagtagtagctctatctagtctagtatctaaacattgggaattgacaaataaaaagtataggtgtatggcattagccgaacatatatctgatagtattccaatatctgagctatctagactacgatacaatctatgtaagtatctacgcggacacactgagagcatagaggataaatttgattattttgaagacgatgattcgtctacatgttctgccgtaaccgacagggaaacggatgtataattttttttatagcgtgaaggatatgataaaaaatataattgttgtatttatcccattccaatcaccttatatgattctgtaacacaatgaaggagtctcatagatgtatagaggtcagatactggtttgataaactgtttattccacatgagtatgtttgactttatggttagacccgcatactttaacaaatcactgaaaattggagttaggtattgacctctcagaatcagttgccgttctggaacattaaatgtattttttatgatatactccaacgcatttatgtgggcatacaacaagtcattactaatggagtattccaagagttttagttgtctagtatttaacaagagaagagatttcaacagactgtttatgaactcgaatgccgcctcattgtcgcttatattgatgatgtcgaattctcccaatatcatcaccgatgagtagctcatcttgttatcgggatccaagttttctaaagatgtcattaaaccctcgatcatgaatggatttatcatcatcgtttttatgttggacatgagcttagtccgtttgtccacatctatagacgacgatttctgaattattttatatatccctctctttaactccaggaacttgtcaggatggtctactttaatatgttctcgtctaagagatgaaaatctttggatggttgcacgcgacttttctctaaaggatgacgttgcccaagatcctctcttaaatgaatccatcttatccttggacaagatggacagtctattttccttagatggtttaatatttttgttacccatgatctataaaggtagacctaatcgtctcggatgacctatatatttattttcagttttattatacgcataaattgtaaaaaatatgttaggtttacaaaaatgtctcgtggggcattaatcgtttttgaaggattggacaaatctggaaaaacaacacaatgtatgaacatcatggaatctataccggcaaacacgataaaatatcttaactttcctcagagatccactgtcactggaaagatgatagatgactatctaactcgtaaaaaaacctataatgatcatatagttaatctattattttgtgcaaatagatgggagtttgcatcttttatacaagaacaactagaacagggaattactttaatagttgatagatacgcgttctctggagtagcgtatgccgccgctaaaggcgcgtcaatgactctcagtaagagttatgaatctggattgcctaaacccgacttagttatattcttggaatctggtagcaaagaaattaatagaaacgtcggcgaggaaatttatgaagatgttacattccaacaaaaggtattacaagaatataaaaaaatgattgaagaaggagatattcattggcaaattatttcttctgaattcgaggaagatgtaaagaaggagttgattaagaatatagttatagaggctatacacacggttactggaccagtggggcaactgtggatgtaatagtgaaattacattttttataaatagatgttagtacagtgttataaatggatgaagcatattactctggcaacttggaatcagtactcggatacgtgtccgatatgcataccgaactcgcatcaatatctcaattagttattgccaagatagaaactatagataatgatatattaaacaaggacattgtaaattttatcatgtgtagatcaaacttggataatccatttatctctttcctagatactgtatatactattatagatcaagagaactatcagaccgaattgattaattcattagacgacaatgaaattatcgattgtatagttaataagtttatgagcttttataaggataacctagaaaatatagtagatgctatcattactctaaaatatataatgaataatccagattttaaaactacgtatgccgaagtactcggttccagaatagccgatatagatattaaacaagtgatacgtgagaatatactacaattgtctaatgatatccgcgaacgatatttgtgaaaaatattaaaaaaaaatactttttttattaaatgacgtcgcttcgcgaatttagaaaattatgctgtgatatatatcacgcatcaggatataaagaaaaatctaaattaattagagactttataacagatagggatgataaatatttgatcattaagctattgcttcccggattagacgatagaatttataacatgaacgataaacaaattataaaattatatagtataatatttaaacaatctcaggaagatatgctacaagatttaggatacggatatataggagacactattaggactttcttcaaagagaacacagaaatccgtccacgagataaaagcattttaactttagaagacgtggatagtttcttaactacgttatcatccgtaactaaagaatcgcatcaaataaaattattgactgatatcgcatccgtttgtacatgtaatgatttaaaatgtgtagtcatgcttattgataaagatctaaaaattaaagcgggtcctcggtacgtacttaacgctattagtcctaatgcctatgatgtgtttagaaaatctaataacttgaaagagataatagaaaatgcatctaaacaaaatctagactctatatctatttctgttatgactccaattaatcccatgttagcggaatcgtgtgattctgtcaataaggcgtttaaaaaatttccatcaggaatgtttgcggaagtcaaatacgatggtgaaagagtacaagttcataaaaataataacgagtttgccttctttagtagaaacatgaaaccagtactctctcataaagtggattatctcaaagaatacataccgaaagcatttaaaaaagctacgtctatcgtattggattctgaaattgttcttgtagacgaacataatgtaccgctcccgtttggaagtttaggaatacacaaaaagaaagaatataaaaactctaacatgtgtttgttcgtgtttgactgtttgtactttgatggattcgatatgacggacattccattgtacgaacgaagatcttttctcaaagatgttatggttgaaatacccaatagaatagtattctcagagttgacgaatattagtaacgagtctcagttaactgacgtattggatgatgcactaacgagaaaattagaaggattggtcttaaaagatattaatggagtatacgaaccgggaaagagaagatggttaaaaataaagcgagactatttgaacgagggttccatggcagattctgccgatttagtagtactaggtgcttactatggtaaaggagcaaagggtggtatcatggcagtctttctaatgggttgttacgacgatgaatccggtaaatggaagacggttaccaagtgttcaggacacgatgataatacgttaagggttttgcaagaccaattaacgatggttaaaattaacaaggatcccaaaaaaattccagagtggttggtagttaataaaatctatattcccgattttgtagtagaggatccgaaacaatctcagatatgggaaatttcaggagcagagtttacatcttccaagtcccataccgcaaatggaatatccattagatttcctagatttactaggattagagaagataaaacgtggaaagaatctactcatctaaacgatttagtaaacttgactaaatcttaatagttacatacaaactgaaaattaaaataacactatttagttggtggtcgccatggatggtgttattgtatactgtctaaacgcgttagtaaaacatggcgaggaaataaatcatataaaaaatgatttcatgattaaaccatgttgtgaaagagtttgtgaaaaagtcaagaacgttcacattggcggacaatctaaaaacaatacagtgattgcagatttgccatatatggataatgcggtatccgatgtatgcaattcactgtataaaaagaatgtatcaagaatatccagatttgctaatttgataaagatagatgacgatgacaagactcctactggtgtatataattattttaaacctaaagatgttattcctgttatcatatctataggaaaggataaagatgtctgtgaactattaatctcatcagacatatcgtgtgcatgcgtggagttaaattcatatcacgtagccattcttcccatggatgtttccttttttaccaaaggaaatgcatcattgattattctcctgtttgatttctctatcgatgcagcacctctcttaagaagtgtaaccgataataatgttattatatctagacaccagcgtctacatgacgagcttccgagttccaattggttcaagttttacataagtataaagtccgactattgttctatattatatatggttgttgatggatctgtgatgcatgcgatagctgataatagaactcacgcaattattagcaaaaatatattagacaatactacgattaacgatgagtgtagatgctgttattttgaaccacagattaggattcttgatagagatgagatgctcaatggatcatcgtgtgatatgaacagacattgtattatgatgaatttacctgatgtaggcaaatttggatctagtatgttggggaaatatgaacctgacatgattaagattgctctttcggtggctggtaatttaataagaaatcgagactacattcccgggagacgaggatatagctactacgtttacggtatagcctctagataatttttttaagcacgaaataaaaaacataattttaaaccaatctatttcatactattttgtgtgatcaccatggacataaagatagatattagtatttctggtgataaatttacggtgactactaggagggaaaatgaagaaagaaaaaaatatctacctctccaaaaagaaaaaactactgatgttatcaaacctgattatcttgagtacgatgacttgttagatagagatgagatgtttactattctagaggaatattttatgtacagaggtctattaggcctcagaataaaatatggacgactctttaacgaaattaaaaaattcgacaatgatgcggaagaacaattcggtactatagaagaactcaagcagaaacttagattaaattctgaagagggagcagataactttatagattatataaaggtacaaaaacaggatatcgtcaaacttactgtatacgattgcatatctatgataggattgtgtgcatgcgtggtagatgtttggagaaatgagaaactgttttctagatggaaatattgtttacgagctattaaactgtttattaatgatcacatgcttgataagataaaatctatactgcagaatagactagtatatgtggaaatgtcatagaaagttaaaagttaatgagagcaaaaatatataaggttgtattccatatttgttattttttctgtaatagttagaaaaatacattcgatggtctatctaccagattattatgtgttataaggtactttttctcataataaactagagtatgagtaagatagtgtttttcaaaacatataaatctaaaattgatggatgagatatacagctattaatttcgaaaatatattttaatctgataactttaaacatggatttttgatggtggtttaacgttttaaaaaaagattttgttattgtagtatatgataatattaaaagatggatataaagaatttgctgactgcatgtactattttttacattactacattggctacggcagatatacctactccgccaccaacgggtcatgtgacaagggagaatatcttgataagaggcataatcaatgttgtaatcggtgtccacctggagaatttgccaaggttagatgtaatggtaacgataacacaaaatgtgaacgctgcccacctcatacatataccacaatcccaattattctaatggatgtcatcaatgtagaaaatgcccaaccggatcatttgataaggtaaagtgtaccggaacacagaacagtaaatgttcgtgtcttcctggttggtattgtgctactgattcttcacagactgaagattgttgaaattgtgtaccaaaaaggagatgtccatgcggatactttggtggaatagatgaacaaggaaatcctatttgtaaatcgtgttgtgttggtgaatattgcgactacctacgtaattatagacttgatccatttcctccatgcaaactatctaaatgtaattaattatgattttgatgataatgttaccatacattatatcgctacttggttagtgtattattcagtatgaagacctattaataattacttatcttttgacgatcttgttataattataatataaaaatacttatggcatagtaactcataattgctgacgcgataaattcgtaataatctgttttgttcaaatttttataaggaatctacaggcataaaaataaaaatataatttataatatactcttacagcgcgccatcatgaataacagcagtgaattgattgctgttattaatggatttagaaatagtggacgattttgtgatattagtatagttattaatgatgaaaggataaacgctcataaactcatcctatctggagcctccgaatatttttccattctgttttccaataattttatcgattctaatgaatacgaagttaatctaagtcatttagattatcaaagcgttaacgatttgatcgattacatttatgggatacctttgagcctaactaacgataacgtgaaatatattctttcaaccgctgattttttacaaattggatctgctattacggagtgtgaaaattacatacttaaaaatctttgttctaaaaactgtatcgatttctacatatacgctgataaatataataacaagaaaatagaatcagcgtcgtttaacacaatattacaaaatattttgagactcatcaacgatgaaaactttaaatacttaacagaggaatcaatgataaaaattttaagcgatgatatgttaaatataaaaaatgaggattttgcaccactaattctcattaaatggttagagagtactcaacaatcatgcaccgtcgagttacttagatgcctcagaatatcattgctttccccacaagttataaaatcactttatagtcatcaactggttagttcaatctacgaatgtataacattcttaaacaatatagcattcttggatgaatcatttcctagataccatagcatcgagttgatatctatcggtataagtaattcgcatgataagatttccataaactgctacaatcataaaaaaaatacatgggaaatgatatcttcacgtagatataggtgtagtttcgcagtggccgtcctggataatattatctatatgatgggtggatatgatcagtccccgtatagaagttcaaaggttatagcgtacaatacatgtacaaattcttggatatatgatataccagagctaaaatatcctcgttctaattgtgggggactggctgatgacgaatacatttattgtataggcggcatacgcgatcaggattcatcgttgacatctagtattgataaatggaagccatcaaaaccatattggcagaagtatgctaaaatgcgcgaaccaaaatgtgatatgggggttgcgatgttaaacggattaatatatgtcatgggtggaatcgttaaaggtgacacgtgtaccgacgcactagagagtttatcagaagatggatggatgaagcatcaacgtcttccaataaaaatgtccaatatgtcgacgattgttcatgatggcaagatttatatatctggaggttacaacaatagtagtgtagttaatgtaatatcgaatctagtccttagctataatccgatatatgatgaatggaccaaattatcatcattaaacattcctagaattaatcccgctctatggtcagcgcataataaattatatgtaggaggaggaatatctgatgatgttcgaactaatacatctgaaacatacgataaagaaaaagattgttggacattggataatggtcacgtgttaccacgcaattatataatgtataaatgcgaaccgattaaacataaatatccattggaaaaaacacagtacacgaatgattttctaaagtatttggaaagttttataggtagttgatagaacaaaatacataattttgtaaaaataaatcactttttatactaatatgacacgattaccaatacttttgttactaatatcattagtatacgctacaccttttcctcagacatctaaaaaaataggtgatgatgcaactctatcatgtaatcgaaataatacaaatgactacgttgttatgagtgcttggtataaggagcccaattccattattcttttagctgctaaaagcgacgtcttgtattttgataattataccaaggataaaatatcttacgactctccatacgatgatctagttacaactatcacaattaaatcattgactgctagagatgccggtacttatgtatgtgcattctttatgacatcaactacaaatgacactgataaagtagattatgaagaatactccacagagttgattgtaaatacagatagtgaatcgactatagacataatactatctggatctacacattcaccggaaactagttctaagaaacctgattatatagataattctaattgctcgtcggtattcgaaatcgcgactccggaaccaattactgataatgtagaagatcatacagacaccgtcacatacactagtgatagcattaatacagtaagtgcatcatctggagaatccacaacagacgagactccggaaccaattactgataaagaagatcatacagttacagacactgtctcatacactacagtaagtacatcatctggaattgtcactactaaatcaaccaccgatgatgcggatctttatgatacgtacaatgataatgatacagtaccaccaactactgtaggcggtagtacaacctctattagcaattataaaaccaaggactttgtagaaatatttggtattaccgcattaattatattgtcggccgtggcaattttctgtattacatattatatatataataaacgttcacgtaaatacaaaacagagaacaaagtctagatttttgacttacataaatgtctgggatagtaaaatctatcatattgagcggaccatctggtttaggaaagacagccatagccaaaagactatgggaatatatttggatttgtggtgtcccataccactagatttcctcgtcctatggaacgagaaggtgttgattaccattacgttaacagagaggccatctggaagggaatagccgccggaaactttctagaacatactgagtttttaggaaatatttacggaacttctaaaacagctgtgaatacagcggctattaataatcgtatttgtgtgatggatctaaacatcgacggtgttagaagtcttaaaaatacgtacctaatgccttactcggtgtatataagacctacctctcttaaaatggttgagaccaagcttcgttgtagaaacactgaagctaacgatgagattcatcgtcgcgtgatattggcaaaaacggatatggatgaggccaacgaagcaggtctattcgacactattatcattgaagatgatgtgaatttagcatatagtaagttaattcagatactacaggaccgtattagaatgtattttaacactaattagagacttaagacttaaaacttgataattaataatataactcgtttttatatgtggctatttcaacgtctaatgtattagttaaatattaaaacttaccacgtaaaacttaaaatttaaaatgatatttcattgacagatagatcacacattatgaactttcaaggacttgtgttaactgacaattgcaaaaatcaatgggtcgttggaccattaataggaaaaggtggattcggtagtatttatactactaatgacaataattatgtagtaaaaatagagcccaaagctaacggatcattatttaccgaacaggcattttatactagagtacttaaaccatccgttatcgaagaatggaaaaaatctcacaatataaagcacgtaggtcttatcacgtgcaaggcatttggtctatacaaatccattaatgtggaatatcgattcttggtaattaatagattaggtgcagatctagatgcggtgatcagagccaataataatagattaccaaaaaggtcggtgatgttgatcggaatcgaaatcttaaataccatacaatttatgcacgagcaaggatattctcacggagatattaaagcgagtaatatagtcttggatcaaatagataagaataaattatatctagtggattacggattggtttctaaattcatgtctaatggagaacatgttccatttataagaaatccaaataaaatggataacggtactctagaatttacacctatagattcgcataaaggatacgttgtatctagacgtggagatctagaaacacttggatattgtatgattagatggttgggaggtatcttgccatggactaagatatctgaaacaaagaattgtgcattagtaagtgccacaaaacagaaatatgttaacaatactgcgactttgttaatgaccagtttgcaatatgcacctagagaattgctgcaatatattaccatggtaaactctttgacatattttgaggaacccaattatgacgagtttcggcacatattaatgcagggtgtatattattaagtgtggtgtttggtcgatgtaaaatttttgtcgataaaaattaaaaaataacttaatttattattgatctcgtgtgtacaaccgaaatcatggcgatgttttacgcacacgctctcggtgggtacgacgagaatcttcatgcctttcctggaatatcatcgactgttgccaatgatgtcaggaaatattctgttgtgtcagtttataataacaagtatgacattgtaaaagacaaatatatgtggtgttacagtcaggtgaacaagagatatattggagcactgctgcctatgtttgagtgcaatgaatatctacaaattggagatccgatccatgatcaagaaggaaatcaaatctctatcatcacatatcgccacaaaaactactatgctctaagcggaatcgggtacgagagtctagacttgtgtttggaaggagtagggattcatcatcacgtacttgaaacaggaaacgctgtatatggaaaagttcaacatgattattctactatcaaagagaaggccaaagaaatgaatgcacttagtccaggacctatcattgattaccacgtctggataggagattgtatctgtcaagttactgctgtggacgtacatggaaaggaaattatgagaatgagattcaaaaagggtgcggtgcttccgatcccaaatctggtaaaagttaaacttggggagaatgatacagaaaatctttcttctactatatcggcggcaccatcgaggtaaccacctctctggaagacagcgtgaataatgtactcatgaaacgtttggaaactatacgccatatgtggtctgtcgtatatgatcattttgatattgtgaatggtaaagaatgctgttatgtgcatacgcatttgtctaatcaaaatcttataccgagtactgtaaaaacaaatttgtacatgaagactatgggatcatgcattcaaatggattccatggaagctctagagtatcttagcgaactgaaggaatcaggtggatggagtcccagaccagaaatgcaggaatttgaatatccagatggagtggaagacactgaatcaattgagagattggtagaggagttcttcaatagatcagaacttcaggctggtgaatcagtcaaatttggtaattctattaatgttaaacatacatctgtttcagctaagcaactaagaacacgtatacggcagcagcttcctttatactctcatcttttaccaacacaaagggtggatatttgttcattggagttgataataatacacacaaagtaattggattcacggtgggtcatgactacctcagactggtagagaatgatatagaaaagcatatcaaaagacttcgtgttgtgcatttctgtgagaagaaagaggacatcaagtacacgtgtcgattcatcaaggtatataaacctggggatgaggctacctcgacatacgtgtgcgctatcaaagtggaaagatgctgttgtgctgtgtttgcagattggccagaatcatggtatatggatactaatggtatcaagaagtattctccagatgaatgggtgtcacatataaaattttaattaatgtaatagagaacaaataataaggttgtaatatcatatagacaataactaacaattaattagtaactgttatctcttttttaactaaccaactaactatatacctattaatacatcgtaattatagttcttaacatctattaatcattaattcgcttctttaattttttataaactaacattgttaattgaaaagggataacatgttacagaatataaattatatatggatttttttaaaaaggaaatacttgactggagtatatatttatctcttcattatatagcacgcgtgttttccaatttttccacatcccatataatacaggattataatctcgttcgaacatacgagaaagtggataaaacaatagttgattttttatctaggttgccaaatttattccatattttagaatatggggaaaatattctacatatttattctatggatgatgctaatacgaatattataattttttttctagatagagtattaaatattaataagaacgggtcatttatacacaatctcaggttatcatcatccattaatataaaagaatatgtatatcaattagttaataatgatcatccagataataggataagactaatgcttgaaaatggacgtagaacaagacattttttgtcctatatatcagatacagttaatatctatatatgtattttaataaatcatggattttatatagatgccgaagacagttacggttgtacattattacatagatgtatatatcactataagaaatcagaatcagaatcatacaatgaattaattaagatattgttaaataatggatcagatgtagataaaaaagatacgtacggaaacacaccttttatcctattatgtaaacacgatatcaacaacgtggaattgtttgagatatgtttagagaatgctaatatagactctgtagactttaatagatatacacctcttcattatgtctcatgtcgtaataaatatgattttgtaaagttattaatttctaaaggagcaaatgttaatgcgcgtaatagattcggaactactccattttattgtggaattatacacggtatctcgcttataaaactatatttggaatcagacacagagttagaaatagataatgaacatatagttcgtcatttaataatttttgatgctgttgaatctttagattatctattatccagaggagttattgatattaactatcgtactatatacaacgaaacatctatttacgacgctgtcagttataatgcgtataatacgttggtctatctattaaacagaaatggtgattttgagacgattactactagtggatgtacatgtatttcggaagcagtcgcaaacaacaacaaaataataatggaagtactattgtctaaacgaccatctttgaaaattatgatacagtctatgatagcaattactaaacataaacagcataatgcagatttattgaaaatgtgtataaaatatactgcgtgtatgaccgattatgatactcttatagatgtacagtcgctacagcaatataaatggtatattttaaaatgtttcgatgaaatagatatcatgaagagatgttatataaaaaataaaactgtattccaattagttttttgtatcaaagacattaatactttaatgagatacggtaaacatccttctttcgtgaaatgcactagtctcgacgtatacggaagtcgtgtacgtaatatcatagcatctattagatatcgtcagagattaattagtctattatccaagaagctggatcctggagataaatggtcgtgttttcctaacgaaataaaatataaaatattggaaaactttaacgataacgaactatccacatatctaaaaatcttataaacactattaaaatataaaatctaagtaggataaaatcacactacatcattgtttccttttagtgctcgacagtgtatactatttttaacactcataaataaaaatgaaaacgatttccgttgttacgttgttatgcgtactacctgctgttgtttattcaacatgtactgtacccactatgaataacgctaaattaacgtctaccgaaacatcgtttaatgataaacagaaagttacgtttacatgtgatcagggatatcattcttcggatccaaatgctgtctgcgaaacagataaatggaaatacgaaaatccatgcaaaaaaatgtgcacagtttctgattacatctctgaattatataataaaccgctatacgaagtgaattccaccatgacactaagttgcaacggcgaaacaaaatattttcgttgcgaagaaaaaaatggaaatacttcttggaatgatactgttacgtgtcctaatgcggaatgtcaacctcttcaattagaacacggatcgtgtcaaccagttaaagaaaaatactcatttggggaatatatgactatcaactgtgatgttggatatgaggttattggtgcttcgtacataagttgtacagctaattcttggaatgttattccatcatgtcaacaaaaatgtgatatgccgtctctatctaatggattaatttccggatctacattttctatcggtggcgttatacatcttagttgtaaaagtggttttacactaacggggtctccatcatccacatgtatcgacggtaaatggaatcccgtactcccaatatgtgtacgaactaacgaagaatttgatccagtggatgatggtcccgacgatgagacagatttgagcaaactctcgaaagacgttgtacaatatgaacaagaaatagaatcgttagaagcaacttatcatataatcatagtggcgttaacaattatgggcgtcatatttttaatctccgttatagtattagtttgttcctgtgacaaaaataatgaccaatataagttccataaattgctaccgtaaatataaatccgttaaaataatgaataattaataacgaacaagtatcaaaagattaaagaattatagctagaatcaattgagatgtcttcttcagtggatgttgatatctacgatgccgttagagcatttttactcaggcactattataacaagagatttattgtgtatggaagaagtaacgccatattacataatatatacaggctatttacaagatgcgccgttataccgttcgatgatatagtacgtactatgccaaatgaatcacgtgttaaacaatgggtgatggatacacttaatggtataatgatgaatgaacgcgatgtttctgtaagcgttggcaccggaatactattcatggaaatgtttttcgattacaataaaaatagtatcaacaatcaactaatgtatgatataattaatagcgtatctataattctagctaatgagagatatagaagcgcttttaacgacgatggtatatacatccgtagaaatatgattaacaagttgtacggatacgcatctctaactactattggcacgatcgctggaggtgtttgttattatctgttgatgcatctagttagtttgtataaataattatttcaatatactagttaaaattttaagattttaaatgtataaaaaactaataacgtttttatttgtaataggtgcattagcatcctattcgaataatgagtacactccgtttaataaactgagtgtaaaactctatatagatggagtagataatatagaaaattcatatactgatgataataatgaattggtgttaaattttaaagagtacacaatttctattattacagagtcatgcgacgtcggatttgattccatagatatagatgttataaacgactataaaattattgatatgtataccattgactcgtctactattcaacgcagaggtcacacgtgtagaatatctaccaaattatcatgccattatgataagtacccttatattcacaaatatgatggtgatgagcgacaatattctattactgcagagggaaaatgctataaaggaataaaatatgaaataagtatgatcaacgatgatactctattgagaaaacatactcttaaaattggatctacttatatatttgatcgtcatggacatagtaatacatattattcaaaatatgatttttaaaaatttaaaatatattatcacttcagtgacagtagtcaaataacaaacaacaccatgagatatattataattctcgcagttttgttcattaatagtatacacgctaaaataactagttataagtttgaatccgtcaattttgattccaaaattgaatggactggggatggtctatacaatatatcccttaaaaattatggcatcaagacgtggcaaacaatgtatacaaatgtaccagaaggaacatacgacatatccgcatttccaaagaatgatttcgtatctttctgggttaaatttgaacaaggcgattataaagtggaagagtattgtacgggactatgcgtcgaagtaaaaattggaccaccgactgtaacattgactgaatacgacgaccatatcaatttgtacatcgagcatccgtatgctactagaggtagcaaaaagattcctatttacaaacgcggtgacatgtgtgatatctacttgttgtatacggctaacttcacattcggagattctaaagaaccagtaccatatgatatcgatgactacgattgcacgtctacaggttgcagcatagactttgtcacaacagaaaaagtgtgcgtgacagcacagggagccacagaagggtttctcgaaaaaattactccatggagttcgaaagtatgtctgacacctaaaaagagtgtatatacatgcgcaattagatccaaagaagatgttcccaatttcaaggacaaaatggccagagttatcaagagaaaatttaataaacagtctcaatcttatttaactaaatttctcggtagcacatcaaatgatgttaccacttttcttagcatgcttaacttgactaaatattcataactaatttttattaatgatacaaaaacgaaataaaactgcatattatacactggttaacgcccttataggctctaaccattttcaagatgaggtccctgattatagtccttctgttcccctctatcatctactccatgtctattagacaatgtgagaagactgaagaggaaacatggggattgaaaatagggttgtgtataattgccaaagatttctatcccgaaagaactgattgcagtgttcatctcccaactgcaagtgaaggattgataactgaaggcaatggattcagggatatacgaaacaccgataaattataaaaaaagcaatgtgtccgctgtttccgttaataatactattttcgtaactggcggattattcataaataactctaatagcacgatcgtggttaacaatatggaaaaacttgacatttataaagacaaacaatggtcgattatagaaatgcctatggctagggtatatcacggcatcgactcgacatttggaatgttatattttgccggaggtctatccgttaccgaacaatatggtaatttagagaaaaacaacgagatatcttgttacaatcctagaacgaataagtggtttgatatttcatatactatttataagatatccatatcatcattgtgtaaactaaataacgtcttctatgtatttagtaaggacattggatatgtggaaaagtatgatggtgcatggaagttagtacatgatcgtctccccgctataaaggcattatcaacttctccttattgattgaaaatgaaaatataaatagtttttatgtatagcagtattaccctatagttttattgcttactactaacatggatacagatgttacaaatgtagaagatatcataaatgaaatagatagagagaaagaagaaatactaaaaaatgtagaaattgaaaataataaaaacattaacaagaatcatccaagtggatatattagagaagcactcgttattaataccagtagtaatagtgattccattgataaagaagttatagaatgtatctgtcacgatgtaggaatatagatcatatctactaatttttataatcgatacaaaacataaaaaacaactcgttattacatagcaggcatggaatccttcaagtattgttttgataacgatggcaagaaatggattatcggaaatactttatattctggtaattcaatactatataaggtcagaaaaaatttcactagttcgttctacaattacgtaatgaagatagatcacaaatcacacaagccattgttgtctgaaatacgattctatatatctgtattggatcctttgactatcgacaactggacacgggaacgtggtataaagtatttggctattccagatctgtatggaattggagaaaccgatgattatatgttcttcgttataaagaatttgggaagagtattcgccccaaaggatactgaatcagtcttcgaagcatgcgtcactatgataaacacgttagagtttatacactctcaaggatttacccatggaaaaatagaaccgaggaatatactgattagaaataaacgtctttcactaattgactattctagaactaacaaactatacaagagtggaaactcacatatagattacaacgaggacatgataacttcaggaaatatcaattatatgtgtgtagacaatcatcttggagcaacagtttcaagacgaggagatttagaaatgttgggatattgcatgatagaatggttcggtggcaaacttccatggaaaaacgaaagtagtataaaagtaataaaacaaaaaaaagaatataaaaaatttatagctactttctttgaggactgttttcctgaaggaaatgaacctctggaattagttagatatatagaattagtatacacgttagattattctcaaactcctaattatgacagactacgtaaactgtttatacaagattgaaattatattcttttttttatagagtgtggtagtgttacggatatttaatattagactatctctatcgcgctacacgaccaatatcgattactatggatatcttcagggaaatcgcatcttctatgaaaggagagaatgtattcatttctccagcgtcaatctcgtcagtattgacaatactgtattatggagctaatggatccactgctgaacagctatcaaaatatgtagaaaaggaggagaacatggataaggttagcgctcaaaatatctcattcaaatccataaataaagtatatgggcgatattctgccgtgtttaaagattcctttttgagaaaaattggcgataagtttcaaactgttgacttcactgattgtcgcactatagatgcaatcaacaagtgtgtagatatctttactgaggggaaaatcaatccactattggatgaaccattgtctcctgatacctgtctcctagcaattagtgccgtatactttaaagcaaaatggttgacgccattcgaaaaggaatttaccagtgattatcccttttacgtatctccgacggaaatggtagatgtaagtatgatgtctatgtacggcaaggcatttaatcacgcatctgtaaaggaatcattcggcaacttttcaatcatagaactgccatatgttggagatactagtatgatggtcattcttccagacaagattgatggattagaatccatagaacaaaatctaacagatacaaattttaagaaatggtgtaactctctggaagctacgtttatcgatgttcacattcccaagtttaaggtaacaggctcgtataatctggtggatactctagtaaagtcaggactgacagaggtgttcggttcaactggagattatagcaatatgtgtaattcagatgtgagtgtcgacgctatgatccacaaaacgtatatagatgtcaatgaagagtatacagaagcagctgcagcaacttgtgcactggtgtcagactgtgcatcaacaattacaaatgagttctgtgtagatcatccgttcatctatgtgattaggcatgttgatggaaaaattcttttcgttggtagatattgctctccgacaactaattgttaaccattttttttaaaaaatagaaaaaacatgtggtattagtgcaggtcgttattcttccaattgcaattggtaagatgacggccaactttagtacccacgtcttttcaccacagcactgtggatgtgacagactgaccagtattgatgacgtcagacaatgtttgactgaatatatttattggtcgtcctatgcataccgcaacaggcaatgcgctggacaattgtattccacactcctctcttttagagatgatgcggaattagtgttcatcgacattcgcgagctggtaaaaaatatgccgtgggatgatgtcaaagattgtgcagaaatcatccgttgttatataccggatgagcaaaaaaccatcagagagatttcggccatcatcggactttgtgcatatgctgctacttactggggaggtgaagaccatcccactagtaacagtctgaacgcattgtttgtgatgcttgagatgctcaattacgtggattataacatcatattccggcgtatgaattgatgagttgtacatcttgacattttcttctttcttctcttctccctttcccagaaacaaactttttttacccactataaaataaaatgagtatactacctgttatatttctttctatatttttttattcttcattcgttcagacttttaacgcgcctgaatgtatcgacaaagggcaatattttgcatcattcatggagttagaaaacgagccagtaatcttaccatgtcctcaaataaatacgctatcatccggatataatatattagatattttatgggaaaaacgaggagcggataatgatagaattataccgatagataatggtagcaatatgctaattctgaacccgacacaatcagactctggtatttatatatgcattaccacgaacgaaacctactgtgacatgatgtcgttaaatttgacaatcgtgtctgtctcagaatcaaatatagatcttatctcgtatccacaaatagtaaatgagagatctactggcgaaatggtatgtcccaatattaatgcatttattgctagtaacgtaaacgcagatattatatggagcgggcatcgacgccttagaaataagagacttaaacaacggacacctggaattattaccatagaagatgttagaaaaaatgatgctggttattatacatgtgttttagaatatatatacggtggcaaaacatataacgtaaccagaattgtaaaattagaggtacgggataaaataataccttctactatgcaattaccagatggcattgtaacttcaataggtagtaatttgactattgcatgcagagtatcgttgagacctcccacaacggatgcagacgtcttttggataagtaatggtatgtattacgaagaagatgatggggacggaaacggtagaataagtgtagcaaataaaatctatatgaccgataagagacgtgttattacatcccggttaaacattaatcctgtcaaggaagaagatgctacaacgtttacgtgtatggcgtttactattcctagcatcagtaaaacagttactgttagtataacgtgaatgtatgttgttacatttccatgtcaattgagtttataagaatttttatacattatcttccaacaagcaattgacgaacgtattgctatgattaactcccacgatactatgcatattattaatcattaacttgcagactatacctagagctattttgacatactcgtgttcttgtgtaattgcagtatctatattattaaagtacgtaaatctagctatagttttattatttaattttagataatataccgtctccttatttttaaaaattgccacatcctttattaaatcatgaatgggaatttctatgtcatagttaatatattgtgaacaacaagagcagatatctataggaaagggtggaatgcgatacattgatctatgtagttttaaaacacacgcaaactttgaagaatttatataaatcattccatcgatacatccttctatgttgagatgtatatatccaggaattcgtttattaatatcgggaaatgtataaactaaaacattgcccggaagcggagcttctaccggagttatatcagtttttaacttacaaaatgtaaccaatacctttgcatgacttgttttgttcggcaacgttagtttaaacttgacgaatggattaattacaatagcatgatccgcgcatctattaagtttttttactttaacgcccttgtatgtttttacagagactttatctaaatttctagtgcttgtatgtgttataaatataacgggatatagaactgaatcacctaccttagatacccaattacattttatcagatccagataataaacaaattttgtcgccctaactaattctatattgttatatattttacaattggttatgatatcatgtaataacttggaatctaacgcacatcgtcgtacgtttatacaattgtgatttagtgtagtatatctacacatgtatttttccgcgctatagtattctggactagtgataaaactatcgttatatctgtcttcaatgaactcatcgagatattgctctctgtcatattcatacacctgcataaactttctagacatcttacaatccgtgttattttaggatcatatttacatatttacgggtatatcaaagatgttagattagttaatgggaatcgtctataataatgaatattaaacaattatatgaggacttttaccacaaagcatcataaaaatgagtcgtcgtctgatttatgttttaaatatcaaccgcgaatcaactcataaaatacaagagaatgaaatatatacatattttagtcattgcaatatagaccatacttctacagaacttgattttgtagttaaaaactatgatctaaacagacgacaacctgtaactgggtatactgcactacactgctatttgtataataattactttacaaacgatgtactgaagatattattaaatcatggagtggatgtaacgatgaaaaccagtagcggacgtatgcctgtttatatattgcttactagatgttgcaatatttcacatgatgtagtgatagatatgatagacaaagataaaaaccacttattacatagagactattccaacctattactagagtatataaaatctcgttacatgttattaaaggaagaggatatcgatgagaacatagtatccactttattagataagggaatcgatcctaactttaaacaagacggatatacagcgttacattattattatttgtgtctcgcacacgtttataaaccaggtgagtgtagaaaaccgataacgataaaaaaggccaagcgaattatttctttgtttatacaacatggagctaatctaaacgcgttagataattgtggtaatacaccattccatttgtatcttagtattgaaatgtgtaataatattcatatgactaaaatgctgttgacttttaatccgaatttcgaaatatgtaataatcatggattaacgcctatactatgttatataacttccgactacatacaacacgatattcttgttatgttaatacatcactatgaaacaaatgttggagaaatgccgatagatgagcgtcgtataatcgtattcgagtttatcaaaacatattctacacgtcctgcagattcgataacttatttgatgaataggtttaaaaatatagatatttatacccgctatgaaggaaagacattattacacgtagcatgtgaatataataatacacacgtaatagattatcttatacgtatcaacggagatataaatgcgttaaccgacaataacaaacacgctacacaactcattatagataacaaagaaaattccccatataccattaattgtttactgtatatacttagatatattgtagataagaatgtgataagatcgttggtggatcaacttccatctctacctatcttcgatataaaatcatttgagaaattcatatcctactgtatacttttagatgacacattttacaatagacacgttaggaatcgcgattctaaaacgtatcgatacgcattttcaaaatacatgtcgtttgataaatacgatggtataataactaaatgtcataaagaaacaatattgctcaaactatccactgttctagacactacactatatgcagttttaagatgccataattcgaaaaagttaagaagatacctcaccgagttaaaaaaatataataacgataagtcctttaaaatatattctaatattatgaatgagagataccttaatgtatattataaagatatgtacgtgtcaaaggtatatgataaactatttcctgttttcacagataaaaattgtctactaacattactaccttcagaaattatatacgaaatattatacatgctgacaattaacgatctttataatatatcgtatccacctaccaaagtatagttgtatttttctcatgcgatgtgtgtaaaaaaactgatattatataaatattttagtgccgtataataaagatgacgatgaaaatgatggtacatatatatttcgtatcattattgttattgctattccacagttacgccatagacatcgaaaatgaaatcacagaattcttcaataaaatgagagatactctaccagctaaagactctaaatggttgaatccagcatgtatgttcggaggcacaatgaatgatatagccgctctaggagagccattcagcgcaaagtgtcctcctattgaagacagtcttttatcgcacagatataaagactatgtggttaaatgggaaaggctagaaaaaaatagacggcgacaggtttctaataaacgtgttaaacatggtgatttatggatagccaactatacatctaaattcagtaaccgtaggtatttgtgcaccgtaactacaaagaatggtgactgtgttcagggtatagttagatctcatattagaaaacctccttcatgcattccaaaaacatatgaactaggtactcatgataagtatggcatagacttatactgtggaattctttacgcaaaacattataataatataacttggtataaagataataaggaaattaatatcgacgacattaagtattcacaaacgggaaaggaattaattattcataatccagagttagaagatagcggaagatacgactgttacgttcattacgacgacgttagaatcaagaatgatatcgtagtatcaagatgtaaaatacttacggttataccgtcacaagaccacaggtttaaactaatactagatccaaaaatcaacgtaacgataggagaacctgccaatataacatgcactgctgtgtcaacgtcattattgattgacgatgtactgattgaatgggaaaatccatccggatggcttataggattcgattttgatgtatactctgttttaactagtagaggcggtattaccgaggcgaccttgtactttgaaaatgttactgaagaatatataggtaatacatataaatgtcgtggacacaactattattttgaaaaaacccttacaactacagtagtattggagtaaatatacaatgcatttttatatacattactgaataattattattattatttatatcgtatttgtgctataacgcgactatctaggtatttgtatctcaccgatagagaacatataaatgtagactctattaaacagttgtgtaaaatatcagatcctaatgcatgttatagatgtggatgtacggctttacatgagtacttttataattatagatcagtcaacggaaaatacaagtatagatacaacggttactatcaatattatttatctagcgattatgaaaattataatgaatattattatgatgattatgatagaactggtatgaacagtgagagtgataatatatcaatcaaaacagaatatgaattctatgatgaaacacaagatcaaagtacacaactagtaggttacgacattaaactcaaaaccaatgaggatgattttatggctatgatagatcagtgggtgtccatgattatatagatgaatcaattaataaagtagtatatggaagagagtctcacgtaagatggcgggatatatggcaagaacataatgatggcgtatacagtataggaaaggagtgcatagataatatatacgaagacaaccataccgtagacgaattctacaagatagacagcgtatcagatgtagatgacgcggaacacatatctccgataactaatgatgtatctacacaaacatgggaaaagaaatcagagttagatagatacatggaaatgtatcctcgtcatagatatagtaagcattctgtctttaagggattttctgacaaagttagaaaaaatgatttagacatgaatgtggtaaaagaattactttctaacggtgcatctctaacaattaaggatagcagtaataaggatccaataaccgtttattttcgaagaacgataatgaatttagaaatgattgatgaacgaaagtatatagtacactcctatctaaaaaattataaaaatttcgattatccatttttcaggaagttagttttgactaataaacattgtctcaacaattattataatataagcgacagcaaatatggaacaccgctacatatattggcgtctaataaaaaattaataactcctaattacatgaagttattagtgtataacggaaatgatataaacgcacgaggtgaagatacacaaatgcgaactccattacacaaatatttgtgtaaatttgtatatcataatattgaatatggtatccgatactataatgaaaagattatagacgcatttatagagttaggagccgatctaactattccaaatgacgatggaatgataccagtagtttactgtatacactcaaatgccgaatatggttataacaatattactaacataaagataatacgtaaactacttaatcttagtagacgtgcgtcacataatctatttagagatcgagtcatgcacgattatataagtaatacatatattgatcttgagtgtttagatattattagatcgttggatggattcgatatcaatggttactttgaaggacgtacaccacttcattgcgctatacaacataacttcactcagattgctaagtacttattagatcgaggagctgatatagtcgtacccaacacattgattatacatcagtacatacagtaaatagcatagatatggaggaggatacaaatatttcaaataaagttataaggtacaacactgtcaataatatatgggaaacattacctaacttctggactggaactataaatccaggcgtggtctcgcataaagatgatatatatgttgtatgcgacatcaaagatgaaaaaaatgttaaaacttgtatatttagatataacacgaatacgtataacggatgggaattggtcacgacgacagaaagcagattatcagctctgcatactattctttataacaataccataatgatgttacattgttatgaatcgtatatgttacaagatacatttaatgtgtacactcgcgaatggaatcatatgtgtcatcaacattcgaatagttatatcatgtacaatatactacccatctactaaatataatagaataaaataaatgagtatgatcattttagataacgattgattttatcattaccgcttcattcttatattctttgcttacggaacctatatttagaaacatctactaacgattttttatgcttgcattattaatggtatgtaatatgattgattgtgtacgcaataccaatttgttaagtatgaatacggggtacaaacataaactgaagtttaacattatttatttatgatatatatcgttattgtttggtctataccatggatatctttaaagaactaatcttaaaacacacggatgaaaatgttttgatttctccagtttctattttatctactttatctattctaaatcatggagcagctggttctacagctgaacaactatcaaaatatatagagaatatgaatgagaatacacccgatgacaataatgacatggacgtagatattccgtattgtgcgacactagctaccgcaaataaaatatacggtagcgatagtatcgagttccacgcctccttcctacaaaaaataaaagacgattttcaaactgtaaactttaataatgctaaccaaacaaaggaactaatcaacgaatgggttaagacaatgacaaatggtaaaattaattccttattgactagtccgctatccattaatactcgtatgacagttgttagcgccgtccattttaaagcaatgtggaaatatccattttctaaacatcttacatatacagacaagttttatatttctaagaatatagttaccagtgttgatatgatggtgagcactgagaataacttgcaatatgtacatattaatgaattattcggaggattctctattatcgatattccatacgagggaaactctagtatggtaattatactaccggacgacatagaaggtatatataacatagaaaaaaatataacagatgaaaaatttaaaaaatggtgtggtatgttatctactaaaagtatagacttgtatatgccaaagtttaaagtggaaatgacagaaccgtataatctggtaccgattttagaaaatttaggacttactaatatattcggatattatgcagattttagcaagatgtgtaatgaaactatcactgtagaaaaatttctacatacgacgtttatagatgttaatgaggagtatacagaagcatcggccgttacaggagtatttatgactaacttttcgatggtatatcgtacgaaggtctacataaaccatccattcatgtacatgattaaagacaacacaggacgtatactttttatagggaaatactgctatccgcaataaatataaacaaatagacttttatcacgtttatctatgtctaaatattacaaatagtaatagtataaactaaagctgataatacttaaaaaaataataatatcatttacaattaatagtataaactaaaaattaaacaaatcgttattataagtaatatcaaaatgatgatatacggattaatagcgtgtcttatattcgtgacttcatccatcgctagtccactttatattcccgttattccacccatttcggaagataaatcgttcaatagtgtagaggtattagtttccttgtttagagatgaccaaaaagactatacggtaacttctcagttcaataactacactatcgataccaaagactggactatcggcgtactatccacacctgatggtttggatataccattgactaatataacttattggtcacggtttactataggtcgtgcattgttcaaatcagagtctgaggatattttccaaaagaaaatgagtattctaggtgtttctatagaatgtaagaagtcgtcgacattacttacttttttgaccgtgcgtaaaatgactcgagtatttaataaatttccagatatggcttattatcgaggagactgtttaaaagccgtttatgtaacaatgacttataaaaatactaaaactggagagactgattacacgtacctctctaatggggggttgcctgcatactatcgtaatggggtcgatggttgattattgattagtatattccttattctttttattcacacaaaaagaacatttttataaacatgaaaccactgtctaaatgtaattatgatcttgatttatagatgaagatcagcctttagaggattttaaccagtatgtttaatatgaaaaaaataaacataacatattttgagattaagcgctattgtgcaagattatattagaatcaaattaatctttcatacgagaaaaataacgacatacgtcgtcaacaaattaaactttttatttattagttaactagcttatagaacttgctcattgttatgtttctaaaacgggtacgacatataggacaattatccgacgcaccggtttctcttcgtgttttatgccatatattgatgcatgttatgcaaaatatatgagtacacgaatccaataaaccaaagtatctatcgttttgagtaaacaacttcatagcaaattccacattctttttctttacttactctatacacgtcctcgtatttatccagtattttgatgatatccaactcagaaatggttgttgtattattgggtgtattgggagtataggtattattagctatgtaccaatttaccaaccctcttaatattgattgaacaatcacatcggttatccaatcaataaccacattaataactaaattgtagtgtatatatagaccatatatgtttctatttttttgacagttacgtatagtttcagtaagttttgattgttgtattcctgtatctctagataagttagtcatatagtcccttccggcgatacgttttttccaagcccgaaattgattagccaaatgtgtatttatttttgtgatattgatataatatgtaatgttattaatatttcggataatgcatactgttagtcttatatcatttggttcatctatgtattgtaatattgttacatgatctatagatgatgtattgattttggcaggatcgaattccatatccgcgactaaacagtgaaaaaaatgtaaatactttttaaattttaaattagtaaaacttttttttattttttatgattccaaaaatactgaatacaaagtcctaaattataaatatggagatcatactaccacaacttattattatgcatactcagccggtgtaatagatagatatatataattctattacaccggcagacaattaccgatcggtatttgtcgttaccaacataccgtataatatgtaatatacaattccataacccattgacagttgttatacatcaaaattgcaattcttttgattacgatgttataagaatgtagttaattgatgtatgatgttaatgtgtcctctttcctcttataacatcgtaatcaaaaacttttttataatatatacctaataatgtgtcttaatagttctcgtgattcgtcaaacaatcattcttataaaatataataaagcaacgtaaaacacataaaaataagcgtaactaataagacaatggatatttacgacgataaaggtctacagactattaaactgtttaataatgaatttgattgtataaggaatgacatcagagaattatttaaacatgtaactgattccgatagtatacaacttccgatggaagacaattctgatattatagaaaatatcagaaaaatactatatagacgattaaaaaatgtagaatgtgttgacatcgatagtacaataacttttatgaaatacgatccaaatgatgataataagcgtacgtgttctaattgggtacccttaactaataactatatggaatattgtctagtaatatatttggaaacaccgatatgtggaggcaaaataaaattataccaccctacaggaaatataaagtcggataaggatattatgtttgcaaagactctagactttaaatcaaagaaagtgttaactggacgtaaaacaattgccgttctagacatatccgtttcatataatagatcaatgactactattcactacaacgacgacgttgatatagatatacatactgataaaaatggaaaagagttatgttattgttatataacaatagatgatcattacttggttgatgtggaaactataggagttatagtcaatagatctggaaaatgtctgttagtaaataaccatctaggtataggtatcgttaaagataaacgtataagcgatagttttggagatgtatgtatggatacaatatttgacttttctgaagcacgagagttattttcattaactaatgatgataacaggaatatagcatgggacactgataaactagacgatgatacagatatatggactcccgtcacagaagatgattacaaatttctttctagactagtattgtatgcaaaatctcaatcggatactgtattcgactattatgttcttactggtgatacggaaccacccactgtattcattttcaaggtaactagattttactttaatatgccgaaataaaaaatttttgtataatatctagaggtagaggtattgtttagataaatacaaataacatagatacatcgcatacttagcatttttataaatatacataagacatacactttatacattttttttgtaaaaatactcataaaaaaatttataaaaattatggcacaaccatatcttgtataggtagtttagttcgtcgagtgaacctataaacagataatagacaacacgtaataataataatgcctactaatacaagcataataccgggagatgggatatatgacgttgtagtgtttgggttttctgaacgttgatagtctactaatactacatgctgacatctaatgcctgtataaccatgagagcatctacaatacataccgtcaatatctctagcgtggatacagtcaccgtgtaaacaatatccatctccctctggaccgcataatctgatagctggaatatctgttgtagcgtttgtaatttctggcgatgtcgtttcgatagcgttaccactatcggcgaatgatctgattatcatagcagcgaacaacaacatcagatatttcatcgacatttttgatggattttgtgtttatgctgtttctcagtgtgtgtttatgacaagattgggaattttatattattaattcagtaatataaactaataatatattgttaattgtgtaaataatataaaaataacaatacaatattgaatgtgttgctgttaaaaatgatcataaacacggagtttattttatatgtctcgcataaacattactaaaaaaatatattgttctgtttttctttcacatctttaattatgaaaaagtaaatcattatgagatggacgagattgtacgcatcgttcgcgacagtatgtggtacatacctaacgtatttatggacgacggtaagaatgaaggtcacgtttctgtcaacaatgtctgtcatatgtatttcacgttctttgatgtggatacatcgtctcatctgtttaagctagttattaaacactgcgatctgaataaacgaggtaactctccattacattgctatacgatgaatacacgatttaatccatctgtattaaagatattgttacaccacggcatgcgtaactttgatagcaaggatgaaaaaggacaccactatcaatcgataacaagatctttgatatactaacggacaccattgatgactttagtaaatcatccgatctattgctgtgttatcttagatataaattcaatgggagcttaaactattacgttctgtacaaaggatccgacgaggatgaactcacttctcttcattactactgtaaacacatatccacgttctacaaaagcaattattacaagttaagtcacactaagatgcgagccgagaagcgattcatctacgcgataatagattatggagcaaacattaacgcggttacacacttaccttcaacagtataccaaacatagtcctcgtgtggtgtatgctcttttatctcgaggagccgatacgaggatacgtaataatcttgattgtacacccatcatggaacgattgtgcaacaggtcatattctcataatgttactcaattggcacgaacaaaaggaagaaggacaacatctactttatctattcataaaacataatcaaggatacactctcaatatactacggtatctactagataggttcgacattcagaaagacgaatactataataccgcctttcaaaattgtaacaacaatgttgcctcatacatcggatacgacatcaaccttccgactaaagacggtattcgacttggtgtttgaaaacagaaacatcatatacaaggcggatgttgtgaatgacatcatccaccacagactgaaagtatctctacctatgattaaatcgttgttctacaagatgtctctccctacgacgattactacgtaaagaagataatagcctactgcctattaagggacgagtcattcgcggaactacatagtaaattctgtttaaacgaggactataaaagtgtatttatgaaaaatatatcattcgataagatagattccatcatcgtgacataagtcgccttaaagagattcgaatctccgacaccgacctgtatacggtatcacagctatcttaaagccatacattcagacagtcacatttcatttcccatgtacgacgatctcatagaacagtgccatctatcgatggagcgtaaaagtaaactcgtcgacaaagcactcaataaattagagtctaccatcggtcaatctagactatcgtatttgcctccggaaattatgcgcaatatcatctaaacagtatgttgtacgaaaagaaccattacaaatattatccatgatagaaagaaaatatctatatgattggagaagtaggaaacaggaacaagacgacgattactacattattaaatcatgaagtccgtattatactcgtatatattgtttctctcatgtataataataaacggaagagatatagcaccgcatgcaccatccgatggaaagtgtaaagacaacgaatacaaacgccataatttgtgtccgggaacatacgcttccagattatgcgatagcaagactaacacacaatgtacgccgtgtggttcgggtaccttcacatctcgcaataatcatttacccgcttgtctaagttgtaacggaagacgcgaccgtgtaacacgactcacaatagaatctgtgaatgctctcccggatattattgtcttctcaaaggatcatccggatgcaaggcatgtgtttcccaaacaaaatgtggaataggatacggagtatccggagacgtcatctgttctccgtgtggtctcggaacatattctcacaccgtctcttccgcagataaatgcgaacccgtacccagtaatacctttaactatatcgatgtggaaattaatctgtatccagttaacgaccactaccggtctcagcgaatccatctcaacgtcggaactaactattactatgaatcataaagactgtaatcccgtatttcgtgaggaatacttctccgtccttaataaggtagcaacttcaggtttctttacaggagaaaggtgtgcactctgaatttcgagattaaatgcaataacaaaaatttttcctccaaacagttaacgaaagcaaagaatgatgacggtatcatgccgcattcggagactgtctatctagcgtcgacatctatatactatatagtaataccaatactcaagactacgaaactgatacaatctcttatcatgtgggtaatgttctcgatgtcgatagccatatgcccggtagttgcgatatacataaactgatcactaattccaaacccacccgctttttatagtaagtttttcacccataaataataaatacaataattaatttctcgtaaaagtagaaaatatattctaatttattgcacggtaaggaagtagaatcataaagaacagtactcaatcaatagcaatcatgaaacaatatatcgtcctggcatgcatgtgcctgccagtcttcagcaatcatcctcatcctcctcctcgtgtacggaagaagaaaacaaacatcatatgggaatcgatgttattatcaaagtcacaaagcaagaccaaacaccgaccaatgataagatttgccaatccgtaacggaaattacagagtccgagtcagatccagatcccgaggtggaatcagaagatgattccacatcagtcgaggatgtagatcctcctaccacttattactccatcatcggtggaggtctgagaatgaactttggattcaccaaatgtcctcagattaaatccatctcagaatccgctgatggaaacacagtgaatgctagattgtccagcgtgtccccaggacaaggtaaggactctcccgcgatcactcatgaagaagctctggctatgatcaaagactgtgaggtgtctatcgacatcagatgtagcgaagaagagaaagacagcgacatcaagacccatccagtactcgggtctaacatctctcataagaaagtgagttacgaagatatcatcggttcaacgatcgtcgatacaaaatgtgtcaagaatctagagtttagcgttcgtatcggagacatgtgcaaggaatcatctgaacttgaggtcaaggatggatttaagtatgtcgacggatcggcatctgaaggtgcaaccgatgatacttcactcatcgattcaacaaaactcaaagcgtgtgtctgaatcgataactctattcatctgaaattggatgagtagggttaatcgaacgattcaggcacaccacgaattaaaaaagtgtaccggacactatattccggtttgcaaaacaaaaatgttcttaactacattcacaaaaagttacctctcgcgacttcttctttttctgtctcaatagtgtgatacgattatgacactattcctattcctattcctatttcctttcagggtatcacaaaaatattaaacctctttctgatggtctcataaaaaaagttttacaaaaatatttttattctctttctctctttgatggtctcataaaaaaagttttacaaaaatatttttattctctttctctctttgatggtctcataaaaaaagttttacaaaaatatttttattctctttctctctttgatggtctcataaaaaaagttttacaaaaatatttttattctctttctctctttgatggtctcataaaaaaagttttacaaaaatatttttattctctttctctctttgatggtctcataaaaaaagttttacaaaaatatttttattctctttctctctttgatggtctcataaaaaaagttttacaaaaatatttttattctctttctctctttgatggtctcataaaaaaagttttacaaaaatatttttattctctttctctctttgatggtctcataaaaaatattaaacctctttctgatggtgtcactaaaatatttttattctcattctcattttctctttctctcttcaatggagtcataaaatatttttattctctttctctcttcgatggtctcacaaaaatattaaacctctttctgatggtgtcactaaaatatttttattctcattctcattttctctttctctcttcaatggagtcataaaatatttttattctctttctctcttcgatggtctcacaaaaatattaaacctctttctgatggagtcgtaaaaaagttttatctctttctctcttcgatggtctcacaaaaatattaaacctctttctgatggagtcgtaaaaaagttttatctctttctctcttcgatggtctcacaaaaatattaaacctctttctgatggagtcgtaaaaaagttttatctctttctctcttcgatggtctcacaaaaatattaaacctctttctgatggagtcgtaaaaaagttttatctctttctctcttcgatggtctcacaaaaatattaaacctctttctgatggagtcgtaaaaaagttttatctctttctctcttcgatggtctcacaaaaatattaaacctctttctgatggagtcgtaaaaaagttttatctctttctctcttcgatggtctcacaaaaatattaaacctctttctgatggagtcgtaaaaaagttttatctctttctctcttcgatggtctcacaaaaatattaaacctctttctgatggagtcgtaaaaaagttttatctctttctctcttcgatggtctcacaaaaatattaaacctctttctgatggagtcgtaaaaaagttttatctctttctctcttcgatggtctcacaaaaatattaaacctctttctgatggagtcgtaaaaaagttttatctctttctctcttcgatggtctcacaaaaatattaaacctctttctgatggagtcgtaaaaaagttttatctctttctctcttcgatggtctcacaaaaatattaaacctctttctgatggagtcgtaaaaaagttttatctctttctctcttcgatggtctcacaaaaatattaaacctctttctgatggagtcgtaaaaaagttttatctctttctctcttcgatggtctcacaaaaatattaaacctctttctgatggagtcgtaaaaaagttttatctctttctctcttcgatggtctcacaaaaatattaaacctctttctgatggagtcgtaaaaaagttttatctctttctctcttcgatggtctcacaaaaatattaaacctctttctgatggagtcgtaaaaaagttttatctctttctctcttcgatggtctcacaaaaatattaaacctctttctgatggagtcgtaaaaaagttttatctctttctctcttcgatggtctcacaaaaatattaaacctctttctgatggagtcgtaaaaaagttttatctctttctctcttcgatggtctcactaaaatattttttattctctttctgatgcatcaactatttcttaaacaataacgtccaacaacatatactcgtcgagcttatcaacatcccctatgcccatctaggttaccagacaattgtatatcataaaataatgtttataatttacacgttaaaatcatataataaaacgtagatcgtataatattttttggtatataaatgatctagtaaaatccatgtaggggatactgctcacattttttctttggtacaaaatttcacacaagtttttatacagacaaattcttgtccatatattttaaaacattgacttttgtactaagaaaaatatctagatcaactatctctttctctttctctcttcgatggtctcacaaaaatattaaacctctttctgatggagtcgtaaaaaagttttatctctttctctcttcgatggtctcacaaaaatattaaacctctttctgatggagtcgtaaaaaagttttatctctttctctcttcgatggtctcacaaaaatattaaacctctttctgatggagtcgtaaaaaagttttatctctttctctcttcgatggtctcacaaaaatattaaacctctttctgatggagtcgtaaaaaagttttatctctttctctcttcgatggtctcacaaaaatattaaacctctttctgatggagtcgtaaaaaagttttatctctttctctcttcgatggtctcacaaaaatattaaacctctttctgatggagtcgtaaaaaagttttatctctttctccttcgatggtctcacaaaaatattaaacctctttctgatggagtcgtaaaaaagttttatctctttctctcttcgatggtctcacaaaaatattaaacctctttctgatggagtcgtaaaaaagttttatctctttctctcttcgatggtctcacaaaaatattaaacctctttctgatggagtcgtaaaaaagttttatctctttctccttcgatggtctcacaaaaatattaaacctctttctgatggagtcgtaaaaaagttttatctctttctccttcgatggtctcacaaaaatattaaacctctttctgatggagtcgtaaaaaagttttatctctttctctcttcgatggtctcacaaaaatattaaacctctttctgatggagtcgtaaaaaagttttatctctttctctcttcgatggtctcacaaaaatattaaacctctttctgatggtctctataaagcgatcgatctttcttacactctagagtttcctacagtcatgggtcacacatttttttctagacactaaataaaattagtaaaattaaattaattataaaattatatatataatttactaactttagttagataaattaataatatataagttttagtacattaatattatattttaaat

SEQ ID NO: 13 - DNA, 191737 bp, Vaccinia virus
  Copenhagen
gtaaaattaaattaattataaaattatgtatatgatttactaactttagttagataagttagtaatacataaattttagtatattaatattatattttaaatatttatttagtgtctagaaaaaaatgtgtgaccaacgaccgtaggaaactctagagggtaagaaaaatcaatcgctttatagagaccatcagaaagaggtttaatatttttgtgagaccatcgaaggagaaagagataaaacttttttacgactccatcagaaagaggtttaatatttttgtgagaccatcgaaggagaaagagataaaacttttttacgactccatcagaaagaggtttaatatttttgtgagaccatcgaaggagaaagagataaaacttttttacgactccatcagaaagaggtttaatatttttgtgagaaaggagaaagagataaaacttttttacgactccatcagaaagaggtttaatatttttgtgagaccatcgaaggagaaagagataaaacttttttacgactccatcagaaagaggtttaatatttttgtgagaccatcgaaggagaaagagataaaacttttttacgactccatcagaaagaggtttaatatttttgtgagaccatcgaaggagaaagagataaaacttttttacgactccatcagaaagaggtttaatatttttgtgagaccatcgaaggagactccatcagaaagaggtttaatatttttgtgagaaaggagaaagagataaaacttttttacgactccatcagaaagaggtttaatatttttgtgagaaaggagaaagagataaaacttttttacgactccatcagaaagaggtttaatatttttgtgagaccatcgaaggagaaagagataaaacttttttacgactccatcagaaagaggtttaatatttttgtgagaccatcgaaggagaaagagataaaacttttttacgactccatcagaaagaggtttaatatttttgtgagaccatcgaagagagaaagagataaaacttttttacgactccatcagaaagaggtttaatatttttgtgagaccatcgaagagagaaagagataaaacttttttacgactccatcagaaagaggtttaatatttttgtgagaccatcgaagagagaaagagataaaacttttttacgactccatcagaaagaggtttaatatttttgtgagaccatcgaagagagaaagagataaaacttttttacgactactccatcagaaagaggtttaatatttttgtgagaccatcgaagagagaaagagataaaacttttttacgactccatcagaaagaggtttaatatttttgtgagaccatcgaagagagaaagagataaaacttttttacgactccatcagaaagaggtttaatatttttgtgagaccatcgaagagagaaagagataaaacttttttacgactccatcagaaagaggtttaatatttttgtgagaccatcgaagagagaaagagataaaacttttttacgactccatcagaaagaggtttaatatttttgtgagaccatcgaagagagaaagagataaaacttttttacgactccatcagaaagaggtttaatatttttgtgagaccatcgaagagagaaagagataaaacttttttacgactccatcagaaagaggtttaatatttttgtgagaccatcgaagagagaaagagataaaacttttttacgactccatcagaaagaggtttaatatttttgtgagaccatcgaagagagaaagagataaaacttttttacgactccatcagaaagaggtttaatatttttgtgagaccatcgaagagagaaagagataaaacttttttacgactccatcagaaagaggtttaatatttttgtgagaccatcgaagagagaaagagataaaacttttttacgactccatcagaaagaggtttaatatttttgtgagaccatcgaagagagaaagagataaaacttttttacgactccatcagaaagaggtttaatatttttgtgagaccatcgaagagagaaagagataaaacttttttacgactccatcagaaagaggtttaatatttttgtgagaccatcgaagagagaaagagataaaacttttttacgactccatcagaaagaggtttaatatttttgtgagaccatcgaagagagaaagagataaaacttttttacgactccatcagaaagaggtttaatatttttgtgagaccatcgaagagagaaagagataaaacttttttacgactccatcagaaagaggtttaatatttttgtgagaccatcgaagagagaaagagataaaacttttttacgactccatcagaaagaggtttaatatttttgtgagaccatcgaagagagaaagagataaaacttttttacgactccatcagaaagaggtttaatatttttgtgagaccatcgaagagagaaagagataaaacttttttacgactccatcagaaagaggtttaatatttttgtgagaccatcgaagagagaaagagataaaacttttttacgactccatcagaaagaggtttaatatttttgtgagaccatcgaagagagaaagataaaacttttttacgactccatcagaaagaggtttaatatttttgtgagaccatcgaagagagaaagagataaaacttttttacgactccatcagaaagaggtttaatatttttgtgagaccatcgaagagagaaagagataaaacttttttacgactccatcagaaagaggtttaatatttttgtgagaccatcgaagagagaaagagaaagagatagttagtctagatatttttcttagtacaaaagtcaatgttttaaaatatatggacaagaatttgtctgtataaaaacttgtgtgaaattttgtaccaaagaaaaaatgtgagcagtatcccctacatggattttactagatcatttatataccaaaaaatattatacgatctacgttttattatatgattttaacgtgtaaattataaacattattttatgatatacaattgtctggtaacctagatgggcataggggatgttgataagctcgacgagtatatgttgttggacgttattgtttaagaaatagttgatgcatcagaaagagaataaaaaatattttagtgagaccatcgaagagagaaagagataaaacttttttacgactccatcagaaagaggtttaatatttttgtgagaccatcgaagagagaaagagaataaaaatattttatgactccattgaagagagaaagagaaaatgagaatgagaataaaaatattttagtgacaccatcagaaagaggtttaatatttttgtgagaccatcgaagagagaaagagaataaaaatattttatgactccattgaagagagaaagagaaaatgagaatgagaataaaaatattttagtgacaccatcagaaagaggtttaatattttttatgagaccatcaaagagagaaagagaataaaaatatttttgtaaaactttttttatgagaccatcaaagagagaaagagaataaaaatatttttgtaaaactttttttgtgagaccatcgaagagagaaagagaataaaaatatttttgtaaaactttttttatgagaccatcaaagagagaaagagaataaaaatatttttgtaaaactttttttatgagaccatcaaagagagaaagagaataaaaatatttttgtaaaactttttttatgagaccatcaaagagagaaagagaataaaaatatttttgtaaaactttttttatgagaccatcaaagagagaaagagaataaaaatatttttgtaaaactttttttatgagaccatcaaagagagaaagagaataaaaatatttttgtaaaactttttttatgagaccatcaaagagagaaagagaataaaaatatttttgtaaaactttttttatgagaccatcagaaagaggtttaatatttttgtgataccctgaaaggaaataggaataggaataggaatagtgtcataatcgtatcacactattgagacagaaaaagaagaagtaacgagaggtaactttttgtgaatgtagttaagaacatttttgttttgcaaaccggaatatagtgtccggtacacttttttaattcgtggtgtgcctgaatcgttcgattaaccctactcatccaatttcagatgaatagagttatcgattcagacacacgctttgagttttgttgaatcgatgagtgaagtatcatcggttgcaccttcagatgccgatccgtcgacatacttgaatccatccttgacctcaagttcagatgattccttgcacatgtctccgatacgaacgctaaactctagattcttgacacattttgtatcgacgatcgttgaaccgatgatatcttcgtaactcactttcttatgagagatgttagacccgagtactggatgggtcttgatgtcgctgtctttctcttcttcgctacatctgatgtcgatagacacctcacagtctttgatcatagccagagcttcttcacgagtgatcgcgggagagtccttaccttgtcctggggacacgctggacaatctagcattcactgtgtttccatcagcggattctgagatggatttaatctgaggacatttggtgaatccaaagttcattctcagacctccaccgatgatggagtaataagtggtaggaggatctacatcctcgactgatgtggaatcatcttctgattccacctcgggatctggatctgactcggactctgtaatttccgttacggattggcaaatcttatcattggtcggtgtttggtcttgctttgtgactttgataataacatcgattcccatatgatgtttgttttcttcttccgtacacgaggaggaggatgaggatgattgctgaagactggcaggcacatgcatgccaggacgatatattgtttcataattgctattgattgagtactgttctttatgattctacttccttaccatgcaataaattagaatatattttctacttttacgagaaattaattattgtatttattatttatgggtgaaaaacttactataaaaagcgggtgggtttggaattagtgatcagtttatgtatatcgcaactaccgggcatatggctatcgacatcgagaacattacccacatgataagagattgtatcagtttcgtagtcttgagtattggtattactatatagtatatagatgtcgacgctagatatacagtctccgaatgcggcatgataccgtcatcattctttgctttcgttaactgtttggaggaagaatctttgttattgcatttaatctcgaaattcagagtgcacacctttctcctgtaaagaatcctgaagtcgctaccttattaagaacggagaagtatccatcacgaaatacgggattacagtctttatgattcatagtaatagttagttccgacgttgagatggattcactgagaccggtagtggtcgtccgagtacacgacgtgtcgttgacgggatacagattaatttccacatcgatatagttaaaggtatttctgggtacgggttcgcatttatctgcggaagagacggtgtgagaatatgttccgagaccacacggagaacagatgacgtctccggatactccgtatcctattccacattttgtttgggaaacacatgccttgcatccggatgatcctttgagaagacaataatatccgggagagcattcacagattctattgtgagtagtgttacacgatcgcgtcttccgttacaacttagacaagcgggtaaatgattattgcgagatgtgaaggtacccgaaccacacggcgtacattgtgtgttagtcttgctatcgcataatctggaagcgtatgttcccggacacaaattatggcgtttgtattcgttgtctttacactttccatcggatggtgcatgcggtgctatatctcttccgtttattattatacatgagagaaacaatatatacgagtataatacggacttcataatttaataatgtagtaatcgttgtcgtgttcctgtttcctacttctccaatcatatagatattttctttctatcatggataatatttgtaatggttctttccgtacaacatactgtttagatgatattgcgcataatttccggaggcaaatacgatagtctagattgaccgatggtagactctaatttattgagtgctttgtcgacgagtttacttttacgctccatcgatagatggcactgttctatgagatcgtcgtacatgggaaatgaaatgtgtctgtccgaatgtatggcttcaagatagctgtgataccgtatacaggtcggtgtcggagattcgaatctctttgaggcgacttatgtcacgatgatggaatctatcttatcgaatgatatatttttcataaatacacttttatagtcctcgtttaaacagaatttactatgtagttccgcgaatgactcgtcccttaataggcagtaggctagtatcttttttacgtagtaatcgtcgtagggagagaattctgacatcttgtagaacaacgatttaatcataggtagagatactttcagtctgtggtggatgatgtcattcacaacatccgccttgtatatgatgtttctgttttcaaacaccaagtcgaataccgtctttagtcggaaggttgatgtcgtatccgatgtatgaggcaacattgttgttacaattttgaaaggcggtatatgtattcgtctttctgaatgtcgaacctatctagtagataccgtagtatattgagagtgtatccttgattatgttttatgaatagataaagtagatgttgtccttcttccttttgttcgtgccaattgagtaacattatgagaatatgacctgttgcacaatcgttccatgatgggtgtacaatcaagattattacgtatcctcgagataaaagagcatacaccacacgaggactatgtttggtatactgttgaaggtaagtgtgtaaccgcgttaatgtttgctccataatctattatcgcgtagatgaatcgcttctcggctcgcatcttagtgtgacttaacttgtaataattgcttttgtagaacgtggatatgtgtttacagtagtaatgaagagaagtgagttcatcctcgtcggcgcaattagggtcggatcctttgtacagaacgtagtagtttaagctcccattgaatttatatctaagataacacagcaatagatcggatgatttactaaagtcatcaatggtgtccgttagtatatcaaagatcttgttatcgattgatagtgaatgaatcagatagtggtgtcctttttcatccttgctatcaaagttacgcatgccgtggtgtaacaatatctttaatacagatggattaaatcgtgtattcatcgtatagcaatgtaatggagagttacctcgtttattcagatcgcagtgtttaataactagcttaaacagatgagacgatgtatccacatcaaagaacgtaaaatacatatgacaaacattgttgacagaaacgtgaccttcattcttaccgtcgtccataaatacgttaggtatgtaccacatactgtcgcgaacgatgctcacaatctcgtccatctcgcccatctcatacatttcatcatttactttttcataattagagatgtacgaaagaaaaagaaaaagaaaaagaaaaacagaacaatatatttttttagtaatgtttatgcgagacatataaaataaactccgtgtttatgatgccggtaaatgtttttatcatcttggacggaatcgattttgtaatatgtcatggaaacaaatgaaacaggacattatcactccatgataaattatttaatggagtaataaagtatctccatgggtaatttcgaaatcaagttatcgtctgtattaatgttgtccactatggagtcgatcctctcactgttctttacagtttctgtaatgatggacgttagttcttttttgtaccatttgatgtcggattctttgcgtatctcagtctgtggcgtttgcttcgtttaaataatatatcaaacatggagacgcctgatatgtaggcattcttcattctattaatgtctactctatagcgctttagttccttatgatgaccggcgatatcatacttactttagaaggaaaatcatcatctaggattaaggcgtatctgatacaggcgaataatggttcaggatatagatagcgtatatctctattaaatgcgtcaatcatagtctctagagtgggatggtagctaagtaataaatcaactatcctcgttttgttttctctttggtaactgcttttctggatggccgtattgattatcgagcgtgatgttgtaacactcgctccatattccaataaccgctttgcaaattgtatattattgacatcgaccgcgtaatatagtagagttttattctcattatcgatcatatctatatcatccatgtacttgcttagtatatcaaatacatctattagtatggtttcataacagtgatacccgcaattattaaatctcgataatatcagaccgtacatacatagacggccattgttagatatgtgatttacagccgcgtgtccatattttccacgataaaccttacgacgtttacatcgacgagattattattaacaaagtagtcgtgcagaggatagttgttgtccgttatctaacatgcatcgaacgaccatatcgccgtaatgtaagtagtttatcaacatggcttgtacgatggattcatcctgttgtctaaatctctttagaatgttatcgatgatgtagtggttatattctctggaatcgtacgaagtaatactacgcattacgtcgacaagagtatgacgtctctcaataagaagattaacgatttccatgtctacattatatggggttactctaaatcgcttgtttagataatacgcctctaatatagggctgacgtcgtatactctacacgtgtccacatcctttattaataataatttaacaatctctatatctatggttgagaaagaccagtagtattggatgggtaaagatcctccttcgtctctgccatggatggaaacattgttattgatcaaacatttaattacatccttggatagagattgagattctctatgagacgatatatagtaatgaagagagttcttacacatatcactgttgtacatacaggtacgaaatacgtaaccggtgctgtaacattctgatttaagaagccatagcaatacttctggtctcggattaggcgtcgttacgtatatatccaccaatccgagaccattgattgcataattcgtattcttggacggacgtatccgtttatccacaattaggtattttagcagacgtaagtcgatattatccgaagacagatcgaaatcatttatattcgacttgagttcgttagaggaattcgaatagctggatatcagtagatgcacaatctgagattttacgtatctatgcttactgtatgctcctagcggagttaatccttcgttgtttctacaaagtctctcgactccgcgagagagtaacagtcgaacaatcttaatgtctgtatcgcatttattggagacgtaacaatgtagcgcattgtttcctcgtctatctatatgttttgataagttgtgacacgtttcaatctctagttttatttttttgtacgtcacatcttcatccagtagacgacatagaatagtgcactctctaccacaataatccatagctattctggtgctaattattcctatttcacgaaaaatgatgaaggcaatcattcctcataagatgataaaaagtgtagtgagagagcatgaaggagatttagtatttagcagtgcggatatgatccaagagggtgagatagtcgttctcgttcagaatctttcgcagcataagtagtatgtcgatatacttatcgttgaagactcttccagagacgatagctgattgagtacaaagtccaatgattgcacgaagttcttcggcggttttcatggagtcatttctgatgaaacatttaatgatctccacgcaattgtcgatattgtcccacggaagtgaatccttcaactcaccaccaaagagctccgttgcatcagttctgaaagagatgagaagcctgtagagagaccctgcgctttctctatgggtccatctatgagaaacccacaggatgtattcagtcagacaatgtctgacgtcggccacggtattcagggagtccttagtagcgtggcaatgacagggtctgaactgggcacaaggaaaggccattgtaaaggtagacctgtagccgtttatgctaatagagggctttaatttccatttttttaatgggttgtggatgaggaatgagagtgatatcatattgagatacgtagttatgtagaggtgtatttcctatattatttactttcggtttcatattttaccaactctttaataaatttcttttcacgatgcatcttattgaatgacgttttctcataagtggacatatagatgcagaagtaatgaagaaaagtattacctctatcatctacataattagggtctgctcctttttttaacaacttatacagtacgtagtagtagtttatcggttttaaatcaagtctagaatatatagtggattaatatatttttatattagctaaagctatctatactatcagaaagcatatcattctcaacttcatcatgagttaaatatttgtgtaatggatgtcatgaacattaaacgtattcatgacatactcctttaataggttttttaaaacagatgattcaaatccttcattcattagataacagtgtaacggagtcgtaccttctactagtttgtttatatcacagcattctacaaacagtctaaacaatagagaagacggacagactttaacgtataaatgacacatgttatcgatattcgttgatgaattattattaaacgtagttatgataaatgattctaacgacatctctcgctagagataaaatctagtatcgtatcattaaacatctttgcatcatactcgcatagcatagtttttcataattaatacaatatttaaaagacttattcggaaagtattttaatacatgtatcatcgatggagatccatatgaggagtcacttgtagttcttcagtagtaataacagtgctatcatcgatagtataattatatgtagaaggttcatatgttgttgtaattggagtaactgttggtagttcttccgtggaatcaataattatactaacagcaatagtataattatataaatatgttccgttgatatcacatattttaatgaactcatttctaacaccctcagctatatctgtccaattaaatgtagccaacaatctactacgttctctttgattgactacttgtacggtagcgacgctacactatctttattgtcttctacatgctccaattgaatgtcatgatacaacgcagtttttcttatgcatgtttcataacaccacgaacatgtcgcagtaagatatatagccagagataatttctgtaaattcatgattgccggtcataaacaagcccgtcaataattgtggctatatattcagtttatagagcaaaataattaagcacaatagcgcttaatctcaaaatatgttatgtttatttttttcatattaaacatactggttaaaatcctctaaaggctgatcttcatctataaatcaagatcataattacatttagacagtggtttcatgtttataaaaatgttctttttgtgtgaataaggaatatactaatcaataatcaaccatcgaccccattacgatagtatgcaggcaacccccattagagaggtacgtgtaatcagtctctccagttttagtatttttataagtcattgttacataaacggcttttaaacagtctcctcgataataagccatatctggaaatttattaaatactcgagtcattttacgcacggtcaaaaaagtaagtaatgtcgacgacttcttacattctatagaaacacctagaatactcattttcttttggaaaatatcctcagactctgatttgaacaatgcacgacctatagtaaaccgtgaccaataagttatattagtcaatggtatatccaaaccatcaggtgtggatagtccagtctttggtatcgatagtgtagttattgaactgagaagttaccgtatagtctttttggtcatctctaaacaaggaaactaatacctctacactattgaacgatttatcttccgtaatgggtggactagcgatggatgaagtcacgaatataagacacgctattaatccgtatatcatcattttgatattacttataataacgatttgtttaatttttagtttatactattaattgtaaatgatattattatttttttaagtattatcagctttagtttatactattactatttgtaatatttagacatagataaacgtgataaaagtctatttgtttatatttattgcggatagcagtatttccctataaaaagtatacgtcctgtggtgtctttaatcatgtacatgaatggatggtttatgtagaccttcgtacgatataccatcgaaaagttaatcgtaaatactcctgtaacggccgatgcttctgtatactcctcattaacatctataaacgtcgtatgtagaaatttttctacagtgatagtttcattacacatcttgctaaaatctgcataatatccgaatatattagtaagtcctaaattttctaaaatcggtaccagattatacggttctgtcatttccactttaaactttggcatatacaagtctatacttttagtagataacataccacaccattttttaaatttttcatctgttatatttttttctatgttatatataccttctatgtcgtccggtagtataatcaccatactagagtttccctcgtatggaatatcgataatagagaatcctccgaataattcattaatatgtacatattgcaagttattctcggtacccaccatcatatcaacactggtaactatattcttagaaatataaaacttgtctgtatatgtaagatgtttagaaaatggatatttccacattgctttaaaatggacggcgctaacaactgtcatacgagtattaatggatagcggactagtcaataaggaattaattttaccatttgtcattgtcttaacccattcgttgattagttcctttgtttggttagcattattaaagtttacagtttgaaaatcgtcttttattttttgtaggaaggaggcgtggaactcgatactatcgctaccgtatattttatttgcggtagctagtgtcgcacaatacggaatatctacgtccatgtcattattgtcatcgggtgtattctcattcatattctctatatattttgatagttgttcagctgtagaaccagctgctccatgatttagaatagataaagtagataaaatagaaactggagaaatcaaaacattttcatcagggtgttttacgattagttctttaaagatatccatggtatagaccaaacaataacgataacgatatatatcataaataaataatgttaaatttcagtttatgtttgtaccccgtattcatacttaacaaattggtattgcgtacacaatcaatcatattacataccattaataatgcaagcataaaaaatcgttagtagatgtttctaaatataggttccgtaagcaaagaatataagaatgaagcggtaatgataaaatcaatcgttatctaaaatgatcatactcatttattttattctattatattaacacatacatttttaacagcaacacattcaatattgtattgttatttttatattatttacacaattaacaatatattattagtttatattactgaattaataatataaaattcccaatcttgttataaacacacactgagaaacagcataaacacagaatccatcaaaaatgtcgatgaaatatctgatgttgttgttcgctgctatgataatcagatcattcgccgatagtggtaacgctatcgaaacgacattgccagaaattacaaacgctacaacagatattccagctatcagattatgcggtccagagggagatggatattgtttacacggtgactgtatccacgctagagatatcgacggtatgtattgtagatgctctcatggttatacaggcattagatgtcagcatgtagtattagtagactatcaacgttcagaaaacccaaacactacaacgtcatatatcccatctcccggtattatgcttgtattagtaggcattattattattattacgtgttgtctattatctgtttataggttcactcgaagaactaataaactacctctacaagatatggttgtgccataatttttataaattttttttatgagtatttttacaaaaatgtataaagtgtatgtcttatgtatatttataaaaatgctaaatatgcgatgtatctatgttatttgtatttatctaaacaatacctctacctctagatattatacaaaaattttttatttcagcatattaaagtaaaatctagttaccttgaaaatgaatacagtgggtggttccgtatcaccagtaagaacataatagtcgaatacagtatccgattgagattttgcatacaatactagtctagaaagaaatttgtaatcatcttctgtgacgggagtccatatatctgtatcatcgtctagtttatcagtgtcccatgctatattcctgttatcatcattagttaatgaaaataactctcgtgcttcagaaaagtcaaatattgtatccatacatacatctccaaaactatcgcttatacgtttatctttaacgatacctatacctagatggttatttactaacagacattttccagatctattgactataactcctatagtttccacatcaaccaagtaatgatcatctattgttatataacaataacataactcttttccgtttttatcagtatgtatatctatattaacgtcgtcgttgtagtgaatagtagttattgatctattatatgaaacggatatgtctagaacggcaattgttttacgtccagttaacactttctttgatttaaagtctagagtctttgcaaacataatatccttatccgactttatatttcctgtagggtggtataattttattttgcctccacatatcggtgtttccaaatatattactagacaatattccatatagttattagttaagggtacccaattagaacacgtacgcttattatcatcatttggatcgtatttcataaaagttattgtactatcgatgtcaacacattctacattttttaatcgtctatatagtatttttctgatattttctataatatcagaattgtcttccatcggaagttgtatactatcagaatcagttacatgtttaaataattctctgatgtcattccttatacaatcaaattcattattaaacagtttaatagtctgtagacctttatcgtcgtaaatatccattgtcttattagttacgcttatttttatgtgtttttacgttgctttattatattttataagaatgattgtttgacgaatcacgagaactattaagacatatattattagaggtatatattataaaaaagtttttgattacgatgttataagaggaaagaggacacattaacatcatacatcaattaactacattcttataacatcgtaatcaaaagaattgcaattttgatgtataacaactgtcaatgggttatggaattgtatattacatattatacagtatgttggtaacgacaaataccgatcggtaattgtctgccggtgtaatagaattatatatatctatctattacaccggctgagtacctacactattatatgattatagtttctatttttacagtaccttaactaaagtctctagtcacaagagcaatactaccaacctacactattatatgattatagtttctatttttataggaacgcgtacgagaaaatcaaatgtctaatttctaacggtagtgttgataaacgattatcgtcaatggatacctcctctatcatgtcgtctattttcttactttgttctattaacttattagcattatatattatttgattataaaacttatattgcttattagcccaatctgtaaatatcggattattaacatatcgtttctttgtaggtttatttaacatgtacatcactgtaagcatgtccgtaccatttattttaatttgacgcatatccgcaatttctttttcgcagtcggttataaattctatatatgatggatacatgctacatgtgtacttataatcgactaatatgaagtacttgatacatattttcagtaacgatttattattaccacctatgaataagtacctgtgatcgtctaggtaatcaactgttttcttaatacattcgatggttggtaatttactcagaataatttccaatatcttaatatataattctgctatttctggaatatatttatctgccagtataacacaaatagtaatacatgtaaacccatattttgttattatattaatgtctgcgccattatctattaaccattctactaggctgacactatgcgacttaatacaatgataaagtatactacatccatgtttatctattttgtttatatcatcaatatacggcttacaaagttttagtatcgataacacatccaactcacgcatagagaaggtagggaataatggcataatatttattaggttatcatcattgtcattatctacaactaagtttccattttttaaaatatactcgacaactttaggatctctattgccaaatttttgaaaatatttatttatatgcttaaatctatataatgtagctccttcatcaatcatacatttaataacattgatgtatactgtatgataagatacatattctaacaatagatcttgtatagaaactgtatatcttttaagaattgtggatattaggatattattacgtaaactattacacaattctaaaatataaaacgtatcacggtcgaataatagttgatcaactatataattatcgattttgtgatttttcttcctaaactgtttacgtaaatagttagatagaatattcattagttcatgaccactatagttactatcgaataacgcgtcaaatatttcccgtttaatatcgcatttgtcaagataataatagagtgtggtatgttcacgataagtataataacgcatctcttttttgtgtgaaattaaatagtttattacgtccaaagatgtagcataaccatcttgtgacctagtaataatataataatagagaactgttttacccattctatcatcataatcagtggtgtagtcgtaatcgtaatcgtctaattcatcatcccaattataatattcaccagcacgtctaatctgttctattttgatcttgtatccatactgtatgttgctacatgtaggtattcctttatccaataatagtttaaacacatctacattgggatttgatgttgtagcgtatttctctacaatattaataccatttttgatactatttatttctatacctttcgaaattagtaatttcaataagtctatatcgatgttatcagaacatagatattcgaatatatcaaaatcattgatatttttatagtcgactgacgacaataacaaaatcacaacatcgtttttgatattattatttttcttggtaacgtatgcctttaatggagtttcaccatcatactcatataatggatttgcaccactttctatcaatgattgtgcactgctggcatcgatgttaaatgttttacaactatcatagagtatcttatcgttaaccatgattggttgttgatgctatcgcattttttggtttctttcatttcagttatgtatggatttagcacgtttgggaagcatgagctcatatgatttcagtactgtagtgtcagtactattagtttcgatcagatcaatgtctagatctatagaatcaaaacacgataggtcagaagataatgaatatctgtacgcttctttttgtactgtaacttctcgttttgttagatgtttgcatcgtgctttaacatcaatggtacaaattttatcctcgctttgtgtatcatattcgtccctactataaaattgtatattcagattatcatgagatgtgtatacgctaacggtatcaataaacggagcacaccatttagtcataaccgtaatccaaaaatttttaaagtatatcttaacgaaagaagttgtatcatcgttaggatttggtaaatcattatctacagtgtatggtactagatcctcataagtgtatatatctagagtaatgtttaatttatcaaatggttgataatatggatcctcatgacaatttccgaagatggaaatgagatatagacatgcaataaatctaatcgaagacatggttactccttaaaaaaatacgaataatcaccttggctatttagtaagtgtcatttaacactatactcatattaatccatggactcataatctctatacgggattaacggatgttctatatacggggatgagtagttctcttctttaactttatactttttactaatcatatttagactgatgtatgggtaatagtgtttgaagagctcgttctcatcatcagaataaatcaatatctctgtttttttgttatacagatgtattacagcctcatatattacgtaatagaacgtgtcatctaccttattaactttcaccgcatagttgtttgcaaatacggttaatcctttgacctcgtcgatttccgaccaatctgggcgtataatgaatctaaactttaatttcttgtaatcattcgaaataatttttagtttgcatccgtagttatcccctttatgtaactgtaaatttctcaacgcgatatctccattaataatgatgtcgaattcgtgctgtatacccatactgaatggatgaacgaataccgacggcgttaatagtaatttactttttcatctttacatattgggtactagttttactatcataagtttataaattccacaagctactatggaataagccaaccatcttagtataacacacatgtcttaaagtttattaattaattacatgttgttttatatatcgctacgaatttaaacagagaaatcagtttaggaaaaaaaattatctatctacatcatcacgtctctgtattctacgatagagtgctactttaagatgagacatatccgtgtcatcaaaaatatactccattaaaatgattattccggcagcgaacttgatattggatatatcacaacctttgttaatatctacgacaatagacagcagtcccatggttccataaacagtgagtttatctttctttgaagagatattttgtagagatcttataaaactgtcgaatgacatcgcatttatatctttagctaaatcgtatatgttaccatcgtaatatctaaccgcgtctatcttaaacgtttccatcgctttaaagacgtttccgatagatggtctcatttcatcagtcatactgagccaacaaatataatcgtgtataacatctttgatagaatcagactctaaagaaaacgaatcggctttattatacgcattcatgataaacttaatgaaaaatgtttttcgttgtttaagttggatgaatagtatgtcttaataattgttattatttcattaattaatatttagtaacgagtacactctataaaaacgagaatgacataactagttatcaaagtgtctaggacgcgtaattttcatatggtatagatcctgtaagcattgtctgtattctggagctattttctctatcgcattagtgagttcagaatatgttataaatttaaatcgaataacgaacataactttagtaaagtcgtctatattaactcttttattttctagccatcgtaataccatgtttaagatagtatattctctagttactacgatctcatcgttgtctagaatatcacatactgaatctacatccaattttagaaattggtctgtgttacatatctcttctatattattgttgatgtattgtcgtagaaaactattacgtagaccattttctttataaaacgaatatatagtactccaattatctttaccgatatatttgcacacataatccattctctcaatcactacatctttaagattttcgttgttaagatatttggctaaactatataattctattagatcatcaacagaatcagtatatatttttctagatccaaagacgaactctttggcgtcctctataatattcccagaaaagatattttcgtgttttagtttatcgagatctgatctgttcatatacgccatgattgtacggtacgttatgataaccgcataaaataaaaatccattttcatttttaaccaatactattcataattgagattgatgtaatactttgttactttgaacgtaaagacagtacacggatccgtatctccaacaagcacgtagtaatcaaatttggtgttgttaaacttcgcaatattcatcaatttagatagaaacttatactcatcatctgttttaggaatccatgtattattaccactttccaacttatcattatcccaggctatgtttcgtccatcatcgttgcgcagagtgaataattcttttgtattcggtagttcaaatatatgatccatgcatagatcggcaaagctattgtagatgtgatttttcctaaatctaatataaaactcgtttactagcaaacactttcctgatttatcgaccaagacacatatggtttctaaatctatcaagtggtggggatccatagttatgacgcagtaacatatattattacattcttgactgtcgctaatatctaaatatttattgttatcgtattggattctgcatatagatggcttgtatgtcaaagatatagaacacataaccaatttatagtcgcgctttacattctcgaatctaaagttaagagatttagaaaacattatatcctcggatgatgttatcactgtttctggagtaggatatattaaagtctttacagatttcgtccgattcaaataaatcactaaataatatcccacattatcatctgttagagtagtatcattaaatctattatattttatgaaagatatatcactgctcacctctatatttcgtacatttttaaactgtttgtataatatctctctgatacaatcagatatatctattgtgtcggtagacgataccgttacatttgaattaatggtgttccattttacaacttttaacaagttgaccaattcatttctaatagtatcaaactctccatgattaaatattttaatagtatccattttatatcactacggacacaaagtagctgacataaaccattgtataatttttatgttttatgtttattagcgtacacattttggaagttccggcttccatgtatttcctggagagcaagtagatgatgaggaaccagatagtttatatccgtacttgcacttaaagtctacattgtcgttgtatgagtatgatcttttaaacccgctagacaagtatccgtttgatattgtaggatgtggacatttaacaatctgacacgtgggtggatcggaccattctcctcctgaacacaggacaccagagttaccaatcaacgaatatccactattgcaactataagttacaacgcttccatcggtataaaaatcctcgtatccgttatgtcttccgttggatatagatggaggggattggcatttaacagattcacaaataggtgcctcgggattccataccatagatccagtagatcctaattcacaatacgatttagattcaccgatcaaatgatatccgctattacaagagtacgttatactagagccaaagtctactccaccaatatcaagttggccattatcgatatctcgaggcgatgggcatctccgtttaatacattgattaaagagtgtccatccagtacctgtacatttagcatatataggtcccattttttgctttctgtatccaggtagacatagatattctatagtgtctcctatgttgtaattagcattagcatcagtctccacactattcttaaatttcatattaatgggtcgtgacggaatagtacagcatgatagaacgcatcctattcccaacaatgtcaggaacgtcacgctctccaccttcatatttatttatccgtaaaaatgttatcctggacatcgtacaaataataaaaagcccatatatgttcgctattgtagaaattgtttttcacagttgctcaaaaacgatggcagtgacttatgagttacgttacactttggagtctcatctttagtaaacatatcataatattcgatattacgagttgacatatcgaacaaattccaagtatttgattttggataatattcgtattttgcatctgctataattaagatataatcaccgcaagaacacacgaacatctttcctacatggttaaagtacatgtacaattctatccatttgtcttccttaactatatatttgtatagataattacgagtctcgtgagtaattccagtaattacatagatgtcgccgtcgtactctacagcataaactatactatgatgtctaggcatgggagacttttttatccaacgatttttagtgaaacattccacatcgtttaatactacatatttttcatacgtggtataaactccacccattacatatatatcatcgtttacgaataccgacgcgcctgaatatctaggagtaattaagtttggaagtcttatccatttcgaagtgccgtgtttcaaatattctgccacacccgttgaaatagaaaattctaatcctcctattacatataactttccatcgttaacacaagtactaacttctgattttaacgacgacatattagtaaccgttttccattttttcgtttcaagatctacccgcgatacggaataaacatgtctattgttaatcatgccgccaataatgtatagacaattatgtaaaacatttgcattatagaattgtctatctgtattaccgactatcgtccaatattctgtcctaggagagtaatgggttattgtggatatataatcagagtttttaatgactactatattatgttttataccatttcgtgtcactggctttgtagatttggatatagttaatcccaacaatgatatagcattgcgcatagtattagtcataaacttgggatgtaaaatgttgatgatatctacatcgtttggatttttatgtatccactttaataatatcatagctgtaacatcctcatgatttacgttaacgtcttcgtgggataagatagttgtcagttcatcctttgataattttccaaattctggatcggatgtcaccgcagtaatattgttgattatttctgacatcgacgcattatatagttttttaattccatatcttttagaaaagttaaacatccttatacaatttgtggaattaatattatgaatcatagtttttacacatagatctactacaggcggaacatcaattattacggcagcaactagtatcatttctacattgtttatggtgatgtttatcttcttccagcgcatatagtctaatagcgattcaaacgcgtgatagtttataccattcaatataatcgcttcatcctttagatggtgatcctgaatgcgtttaaaaaaattatacggagacgccgtaataatttccttattcacttgtataatttccccattgatagaaaatatcacgctttccattcttgaagtactataagtaattatagtataatgtaaaggtttatatattcaatattttttataaaaaaatcatttcgacattaattcctttttaaatttgcgtctatcatctatagaaacatattctatgaatttataaaatgcttttacgtgtcctatcgtaggcgatagaaccgctaaaaagcctatcgaatttctacaaaagaatctgttatatggtatagggagagtataaaacattaaatgtccgtacttattaaagtattcagtagccaatcctaactctttcgaatacttattaatggctcttgttctgtacgaatctatttttttgaacaacggacctagtggtatatcttgttctatgtatctaaaataatgtctgactagatccgttagtttaatatcctcagtcatcttgtctagaatggcaaatctaactgcgggtttaggctttagtttagtttctatatctacatctatgtctttatctaacaccaaaaatataatagctaatattttattacaatcatccggatattcttctacgatctcactaactaatgtttctttggttatactagtatagtcactatcggacaaataaagaaaatcagatgatcgatgaataatacatttaaattcatcatctgtaagatttttgagatgtctcattagaatattattagggttagtactcattatcattcggcagctattacttattttattatttttcaccatatagatcaatcattagatcatcaaaatatgtttcaatcatcctaaagagtatggtgaatgactcttcccatctaatttctgaacgttcaccaatgtctctagccactttggcactaatagcgatcattcgcttagcgtcttctatattattaactggttgattcaatctatctagcaatggaccgtcggacagcgtcattctcatgttcttaatcaatgtacatacatcgccgtcatctaccaattcatccaacaacataagctttttaaaatcatcattataataggtttgatcgttgtcatttctccaaagaatatatctaataagtagagtcctcatgattagttaacaactattttttatgttaaatcaattagtacaccgctatgtttaatacttattcatattttagtttttaggattgagaatcaatacaaaaattaatgcatcattaattttagaaatacttagtttccacgtagttaatgaaacatttgaactcatcgtacaggacgttctcgtacaggacgtaactataaaccggtttatatttgttcaagatagatacaaatccgataactttttttacgaattctacgggatccactttaaaagtgtcatacggggttctttttatttttttaaacagatcaatggtgtgatgttgattaggtcttttacgaatttgatatagaatagcgtttacatattctccataatggtcaatcgccatttgttcgtatgtcataaattctttaattatatgacactgtgtattgtttagttcatccttgttcattgttaggaatctattcaaaatggcaattatactagaactataggtgcgttgtatacacatattgatgtgtctgtttatacaatccatgatatttggatccatgctactaccttcgggtaaaattgtagcatcatataccatttctagtactttaggttcattgttatccattgcagaggacgtcatgatcgaatcataaaaaaatatattatttttatgttattttgttaaaaataatcatcgaatacttcgtaagatactccttcatgaacataatcagttacaaaacgtttatatgaagtaaagtatctacgatttttacaaaagtccggatgcataagtacaaagtacgcgataaacggaataataatagatttatctagtttatctttttctatagctttcatagttagatacatggtctcagaagtaggattatgtaacatcagcttcgataaaatgactgggttatttagtcttacacattcgctcatacatgtatgaccgttaactacagagtctacactaaaatgattgaacaatagatagtctaccattgtttcgtattcagatagtacagcgtagtacatagcatcttcacaaattatatcattgtctaatagatatttgacgcatcttatggatcccacttcaacagccatcttaaaatcggtagaatcatattgctttcctttatcattaataatttctagaacatcatctctatcataaaagatacaaatattaactgtttgatccgtaataacattgctagtcgatagcaatttgttaataagatgcgctgggctcaatgtcttaataagaagtgtaagaggactatctccgaatttgttttgtttattaacatccgttgatggaagtaaaagatctataatgtctacattcttgactgttttagagcatacaatatggagaggtgtatttccatcatgatctggttttgagggactaattcctagtttcatcatccatgagattgtagaagcttttggattgtctgacataagatgtctatgaatatgatttttgccaaatttatccactatcctggcttcgaatccgatggacattatttttttaaacactctttctgaaggatctgtacacgccaacaacggaccacatccttcttcatcaaccgagttgttaatcttggctccatactgtaccaataaatttattctctctatgacttcatcatctgttcccgagagataatatagaggtgttttattatgtttatcacacgcgtttggatctgcgccgtgcgtcagcagcatcgcgactattctattattattaattttagaagctatatgcaatggataatttccatcatcatccgtctcatttggagagtatcctctatgaagaagttcttcgacaaatcgttcatctagtcctttaattccacaatacgcatgtagaatgtgataattatttccagaaggttcgatagcttgtagcatattcctaaatacatctaaatttttactattatatttggcataaagagatagataatactcggccgacataatgttgtccattgtagtataaaaattaatatttctatttctatttctgtatatttgcaacaatttactctctataacaaatatcataacttagttcttttatgtcaagaaggcactggtttagttcatctataaatgtcacgccataactaccacgcatgccatactcagaattatgataaagatatttatccttggggtgtaggtaatggggattaatctttgttggatcagtctctaagttaacacatgtcacacatgatccatttatagttatatcacacgatgatgatttatgaattgattccggaagatcgctatcgtattttgtggttccacaattcatttccatacatgttattgtcacactaatattatgatgaactttatctagccgctgagtggtaaacaacagaacagatagtttattatctttaccaacaccctcagccgctgccacaaatctctgatccgtatccatgatggtcatgtttatttctagtccgtatccagtcaacactatgttagcatttctgtcgatatagctttcactcatatgacactcaccaataatagtagaattaatgtcgtaatttacaccaatagtgagttcggcggcaaagtaccaataccggtaatcttgtcgaggaggacatatagtattcttgtattctaccgaatacccgagagatgcgatacaaaagagcaagactaatttgtaaaccatcttactcaaaatatgtaacaatagtacgatgcaatgagtaagacaataggaaatctatcttatatacacataattattctatcaattttaccaattagttagtgtaatgttaacaaaaatgtgggagaatctaattagtttttctttacacaattgacgtacatgagtctgagttccttgtttttgctaattatttcatccaatttattattcttgacgatatcgagatcttttgtataggagtcagacttgtattcaacatgcttttctataatcatcttagttatttcggcatcatccaatagtacattttccagattaacagagtagatattaatgtcgtatttgaacagagcctgtaacatctcaatgtctttattatctatagccaatttaatgtccggaatgaagagaagggaattattggtgtttgtcgacgtcatatagtcgagcaagagaatcatcatatccacgtgtccattttttatagtggtgtgaatacaactaaggagaatagccagatcaaaagtagatggtatttctgaaagaaagtatgatacaatacttacatcattaagcatgacggcatgataaaatgaagttttccatccagttttcccatagaacatcagtctccaatttttcttaacaaacagtttcaccgtttgcatgttaccactatcaaccgcataatacaatgcggtgtttcctttgtcatcaaattgtgaatcatccattccactgaatagcaaaatctttactattttggtatcttctaatgtggctgcctgatgtaatggaaattcattctctagaagatttttcaatgctccagcgttcaacaacgtacatactagacgcacgttattatcagctattgcataatacaaggcactatgtccatggacatccgccttaaatgtatctttactagagagaaagcttttcagctgcttagacttccaagtattaattcgtgacagatccatgtctgaaacgagacgctaattagtgtatattttttcattttttataattttgtcatattgcaccagaattaataatatctctaatagatctgattagtagatacatggctatcgcaaaacaacatatacacatttaataaaaataatatttattaagaaaattcagatttcacgtacccatcaatataaataaaataatgattccttccaccgtatccataaacaatattaaggagattctaccttacccataaacaatataaatccagtaatatcatgtctaatgatgaacacaaatggtgtattaaattccagtttttcaggagatgatctcgccgtagctaccatgatagtagatgcctctgctacagttccttgttcgtcgacatctatctttgcattctgaaacattttataaatatataatgggtccctagtcatatgtttaaacgacgcattatctggattaaacatactaggagccatcatttcggctatcgacttaatatccctcttattttcgatagaaaatttagggagtttaagattgtacactttattccctaattgaaacgaccaatagtctaattttgcagccgtaatagaatctgtgaaatgggtcatattatcacctattgccaggtacatactaatattagcatccttatacggaaggcgcaccatatcatattcttcgtcatcgattgtgattgtatttccttgcaatttagtaactacgttcatcatgggaaccgttttcgtaccgtacttattagtaaaactagcattgcgtgttttagtgatatcaaacggatattgccatgtacctttaaaatatatagtattaatgattgcccatagagtattattgtcgagcatattagaatctactacattagacataccggatctacgttctactatagaattaattttattaaccgcatctcgtctaaagtttaatctatataggccgaatctatgatattgttgataatacaacggtttaatgcacacagtattatctacgaaactttgataagttagatcagtgtacgtatatttagatgttttcagcttagctaatcctgatattaattctgtaaatgctggacccagatctctttttctcaaatccatagtcttcaataattctattctagtattacctgatgcaggcaatagcgacataaacatagaaaacgaataaccaaacggtgagaagacaatattatcatcttgaatatttttatacgctactataccggcattggtaaatccttgcagacgataggtagacactgaacacgttaacgatagtatcaataacgcaatcatgattttatggtattaataattaaccttatttttatgttcggtataaaaattattgatgtctacacatccttttgtaattgacatctatatatccttttgtataatcaactctaatcactttaacttttacagttttccctaccagtttatccctatattcaacatatctatccatatgcatcttaacactctctgccaagatagcttcagagtgaggatagtcaaaaagataaatgtatagagcataatccttctcgtatactctgccctttattacatcgcccgcattgggcaacgaataacaaaatgcaagcatcttgttaacgggctcgtaaattgggataaaaattatgtttttatatctattttattcaagagaatattcaggaatttctttttccggttgtatctcatcgcagtatatatcatttgtacattgtttcatattttttaatagtttacaccttttagtaggactagtatcgtacaattcatagctgtattttgaattccaatcacgcataaaaatatcttccaattgttgacgaagacctaatccatcatccggtgtaatattaatagatgctccacatgtatccgtaaagtaatttcctgtccaatttgaggtacctatataggccgttttatcggttaccatatatttggcatggtttaccctagaatacggaatgggaggatcagcatctggtacaataaatagctttacttctatatctatgtttttagattttagcatagcgatagatcttaaaaagtttctcatgataaacgaagatcgttgccagcaactaatcaatagcttaacggatacttgtctgtctatagcggatcttcttaattcatcttctatataaggccaaaacaaaattttacccgccttcgaataaataatagggataaagttcataacagatacataaacgaatttactcgcatttctaatacatgacaataaagcggttaaatcattggttctttccatagtacatagttgttgcggtgcagaagcaataaatacagagtgtggaacaccacttacgttaatactaagaggatgatctgtattataatacgacggataaaagtttttccaattatatggtagattgttaactccaagataccagtatacctcaaaaatttgagtgagatccgctgccaagttcctattattgaagatcgcaatacccaattctttgacctgagttagtgatctccaatccatgttagcgcttcctaaataaatatgtgtattatcagatatccaaaattttgtatgaagaactcctcctaggatatttgtaatatctatgtatcgtacttcaactccggccatttgtagtctttcaacatcctttaatggtttgttagatttattgacggctactctaactcgtactcctcttttgggtaattgtacaatctcgtttaatattatcgtgccgaaattcgtacccacttcatccgataaactccaataaaaagatgatatatctagtgtttttgtggtattggatagaatttccctccacatgttaaatgtagacaaatatactttatcaaattgcatacctataggaatagtctctgtaatcactgcgattgtattatccggattcattttatttgttaaaagaataatcctatatcacttcactctattaaaaatccaagtttctatttctttcatgactgattttttaacttcatccgtttccttatgaagatgatgtttggcaccttcataaatttttatttctctattacaatttgcatgttgcatgaaataatatgcacctgaaacatcactaatctcattgtttgttccctggagtatgagagtcggggggtgttaatcttggaaattatttttctaaccttgttggtagccttcaagacctgactagcaaatccagccttaattttttcatgattgattaatgggtcgtattggtatttataaactttatccatatctctagatactgattctggacatagctttccgactggcgcatttggtgtgatggttcccataagtttggcagctagcagattcagtcttgaaacagcatctgcattaactagaggagacattagaatcattgctgtaaacaagtttggattatcgtaagaggctagtatagaaattgttgctcccatggaatgacccaataagtagatttaatagttaccacgtgctgtaccaaagtcatcaatcatcattttttcaccattacttcttccatgtccaatatgatcatgtgagaatactaaaattcctaacgatgatatgttttcagctagttcgtcataacgtccagaatgtttaccagctccatgacttatgaatactaatgccttaggatatgtaataggtttccaatatatgtaatcattgtccagattgaacatacagtttgcactcatgattcacgttatataactatcaatattaacagttcgtttgatgatcatattatttttatgttttattgataattgtaaaaacatacaattaaatcaatatagaggaaggagacggatactgtcttttgtgagatagtcatggcgactaaattagattatgaggatgctgttttttactttgtggatgatgataaaatatgtagtcgcgactccatcatcgatctaatagatgaatatattacgtggagaaatcatgttatagtgtttaacaaagatattaccagttgtggaagactgtacaaggaattgatgaagttcgatgatgtcgctatacggtactatggtattgataaaattaatgagattgtcgaagctatgagcgaaggagaccactacatcaattttacaaaagtccatgatcaggaaagtttattcgctaccataggaatatgtgctaaaatcactgaacattggggatacaaaaagatttcagaatctagattccaatcattgggaaacattacagatctgatgaccgacgataatataaacatcttgatactttttctagaaaaaaaattgaattgatgatataggggtcttcataacgcataattattacgttagcattctatatccgtgttaaaaaaaattatcctatcatgtatttgagagttttatatgtagcaaacatgatagctgtgatgccaataagctttagatattcacgcgtgctagtgttagggatggtattatctggtggtgaaatgtccgttatataatctacaaaacaatcatcgcatatagtatgcgatagtagagtaaacatttttatagtttttactggattcatacatcgtctacccaattcggttataaatgaaattgtcgccaatcttacacccaaccccttgttatccattagtatagtattaacttcgttatttatgtcataaactgtaaatgattttgtagatgccatatcatacatgatattcatgtccctattataatcattactaactttatcacaatatatgttgataatatctatatatgatctagtctttgtgggcaactgtctatacaagtcgtctaaacgttgtttactcatatagtatcgaacagccatcattacatggtcccgttccgttgatagataatcgagtatgttagtggacttgtcaaatctatataccatattttctggaagtggatatacatagtcgtgatcaacattattgctagcctcatcttctatatcctgtactataccattatctatatcatctacataatctacgatattattacacataaacatcgacaacatactattgtttattatctaagtcctgttgatccaaacccttgatctcctctatttgtactatctagagattgtacttcttccagttctggataatatatacgttgatagattagctgagctattctatctccagtatttacattaaacgtacattttccattattaataagaatgactcctatgtttcccctataatcttcgtctattacaccacctcctatatcaatgccttttagtgacagaccagacctaggagctattctaccatagcaaatcttaggcatggacatactaatatctgtcttaattaactgtctttctcctggagggatagtataatcgtaagcgctatacaaatcatatccggcagcacccggcgattgcctagtaggagatttagctctgttagtttccttaacaaatctaactggtgagttaatattcatgttgaacataaaactaatattttatttcaaaattatttaccatcccatatattccatgaataagtgtgatgattgtacacttctatagtatctatatacgatccacgataaaatcctcctatcaatagcagtttattatccactatgatcaattctggattatccctcggataaataggatcatctatcagagtccatgtattgctggattcacaataaaattccgcatttctaccaaccaagaataaccttctaccgaacactaacgcgcatgatttataatgaggataataagtggatggtccaaactgccactgatcatgattgggtagcaaatattctgtagttgtatcagtttcagaatgtcctcccattacgtatataacattgtttatggatgccactgctggattacatctaggtttcagaagactcggcatattaacccaagcagcatccccgtggaaccaacgctcaacagatgtgggatttggtagacctcctactacgtataatttattgttagcgggtatccccgtagcatacagtctggggctattcatcggaggaattggaatccaattgtttgatatataatttacagctatagcattgttatgtatttcattgttcatccatccaccgatgagatatactacttctccaacatgagtacttgtacacatatggaatatatctataatttgatccatgttcataggatactctatgaatggatacttgtatgatttgcgtggttgtttatcacaatgaaatattttggtacagtctagtatccattttacattatttatacctctgggagaaagataatttgacctgattacatttttgataaggagtagcagatttcctaatttatttcttcgctttatataccacttaatgacaaaatcaactacataatcctcatctggaacatttagttcatcgctttctagaataagtttcatagatagataatcaaaattgtctatgatgtcatcttccagttccaaaaagtgtttggcaataaagtttttagtatgacataagagattggatagtccgtattctatacccatcatgtaacactcgacacaatattcctttctaaaatctcgtaagataaagtttatacaagtgtagatgataaattctacagaggttaatatagaagcacgtaataaattgacgacgttatgactatctatatatacctttccagtatacgagtaaataactatagaagttaaactgtgaatgtcaaggtctagacaaacccttgtaactggatctttatttttcgtgtatttttgacgtaaatgtgtgcgaaagtaaggagataactttttcaatatcgtagaattgactattatattgccacctatagcatcaataattgttttgaatttcttagtcatagacaatgctaatatattcttacagtacacagtattgacaaatatcggcatttatgtttctttaaaagtcaacatctaaagaaaaatgattatcttcttgagacataactcccattttttggtattcacccacacgtttttcgaaaaaattagtttttccttccaatgatatattttccatgaaatcaaacggattggtaacattataaatttttttaaatcccaattcagaaatcaatctatccgcgacaaattctatatatgttttcatcatttcacaattcattcctataagtttaactggaagagccgcagtaagaaattcttgttcaatggatactgcatctgttataatagatctaacggtttcttcactcggtggatacaataaatgtttaaacatcaaacatgcgaagtcgcagtgcagaccctcgtctctactaattagttcgttggaaaacgtgagtccgggcattaggccacgctttttaagccaaaatatggaagcgaatgatccggaaaagaagattccttctactgcagcaaaggcaataagtctctctccataaccggcgctgtcatgtatccacttttgagcccaatcggccttcttttttacacaaggcattgtttctatggcattaaagagatagtttttttcattactatctttaacataagtatcgatcaaaagactatacatttccgaatgaatgttttcaatggccatctgaaatccgtagaaacatctagcctcggtaatctgtacttctgtacaaaatcgttccgccaaattttcattcactattccgtcactggctgcaaaaaacgccaatacatgttttataaaatatttttcgtctggtgttagtttattccaatcattgatatctttagatatatctacttcttccactgtccaaaatgatgcctctgcctttttatacatgttccagatgtcataatattggattgggaaaataacaaatctatttggatttggtgcaaggatgggttccataactaaattaacaatatcaataaattttttttcagttatctatatgcctgtacttggattttttgtacatcgatatcgccgcaatcactacaataattacaagtattattgatagcattgttattagtactatcataattaaattatcgacattcatgggtgctgaataatcgttattatcatcattatcattttgtaattgtgacatcatactagataaatcgtttgcgagattgttgtgggaagcgggcatggaggatgcattatcattattatttaacgccttccattcggattcacaaatatggcgcgcgttcaacattttatggaaactataattttgtgaaaacagataacaagaaaactcgtcatcgttcaaatttttaacgatagtaaaccgattaaacgtcgagctaatttctaacgctagcgactctgttggatatgggtttccagatatatatcttttcagttcccctacgtatctataatcatctgtaggaaatggaagatatttccatttatctactgttcctaatatcatatgtggtggtgtagtagaaccattaagcgcgaaagatgttatttcgcatcgtattttaacttcgcaataatttctggttagataacgcactctaccagtcaagtcaatgatattagcctttacagatatattcatagtagtcgtaacgatgactccatcttttagatgcgatactcctttgtatgtaccagaatcttcgtacctcaaactcgatatatttaaacaagttaatgagatattaacgcgttttatgaatgatgatatataaccagaagttttatcctcggtggctagcgctataaccttatcattataataccaactagtgtgattaatatgtgacacgtcagtgtgggtacaaatatgtacattatcgtctacgtcgtattcgatacatccgcatacagccaacaaatataaaatgacaaatactctaacgacgttcgtacccatcttgatgcggtttaataaatgttttgatttcaatttattgtaaaaaaagattcggttttatactgttcgatattctcattgcttatattttcatctatcatctccacacagtcaaatccgtggttagcatgcacctcatcaaccggtaaaagactatcggactcttctatcattataactctagaatatttaatttggtcattattaatcaagtcaattatcttatttttaacaaacgtgagtattttactcattttttataaaaacttttagaaatatacagactctatcgtgtgtctatatcttctttttatatccaatgtatttatgtctgatttttcttcatttatcatatataatggtccaaattctacacgtgcttcggattcatccagatcattaaggttcttataattgtaacatccttctcttccctcttctacatcttccttcttattcttattcttattcttattcttattcttattcttattcttattcttagcgtcacagaatctaccacagcagaatcccatgacgagcgtcatattaaactaattcattttcaattataatatacgattagtaatgaccattaaaataaaaaatattcttcataaccggcaagaaagtgaaaagttcacattgaaactatgtcagtagtatacatcatgaaatgatgatatatatattctctattttggtggaggattatatgatataattcgtggataatcattcttaagacacatttcttcattcgtaaatcttttcacgttaaatgagtgtccatattttgcaatttcttcatatgatggcggtgtacgtggacgaggctgctcctgttcttgttgtggtcgccgactatcgtgtttgcgtttagatccctccattatcgcgattgcgtagatggagtactattttataccttgtaattaaatttttttattaattaaacgtataaaaacgttccgtatctgtatttaagagccagatttcgtctaatagaacaaatagctacagtaaaaataactagaataattgctacacccactagaaaccacggatcgtaatacggcaatcggttttcgataataggtggaacgtatattttatttaaggacttaacaattgtctgtaaaccacaatttgcttcagcggatcctgtattaactatctgtaaaagcatatgttgaccgggcggagccgaacattctccgatatctaatttctgtatatctataatattattaacctccgcatacgcattacagttcttttctagcttggataccgcactaggtacatcgtctagatctattcctatttcctcagcgatagctcttctatccttttccggaagcaatgaaatcacttcaataaatgattcaaccatgagtgtgaaactaagtctagaattactcatgcatttgttagttattcggagcgcgcaatttttaaactgtcctataacctctcctatatgaatagcacaagtgacattagtagggatagaatgttgagctaatttttgtaaataactatctataaaaagattatacaaagttttaaactctttagtttccgccatttatccagtctgagaaaatgtctctcataataaatttttccaagaaactaattgggtgaagaatggaaacctttaatctatatttatcacagtctgttttggtacacatgatgaattcttccaatgccgtactaaattcgatatctttttcgatttctggatatgtttttaataaagtatgaacaaagaaatggaaatcgtaataccagttatgtttaactttgaaattgttttttattttcttgttaatgattccagccacttgggaaaagtcaaagtcgtttaatgccgatttaatacgttcattaaaaacaaactttttatcctttagatgaattattattggttcattggaatcaaaaagtaagatattatcgggtttaagatctgcgtgtaaaaagttgtcgcagcatggtagttcgtagattttaatgtataacagagccatctgtaaaaagataaactttatgtattgtaccaaagatttaaatcctaatttgatagctaactcggtatctactttatctgccgaatacagtgctaggggaaaaattataatgtttcctctttcatattcgtagttagttctcttttcatgttcgaaaaagtgaaacatgcggttaaaatagtttataacattaatattactgttaataactgccgggtaaaagtgggatagtaatttcacgaatttgatactgtcctttctctcgttaaacgcctttagaaaaactttagaagaatatctcaatgagagttcctgaccatccatagtttgtatcaataatagcaacatatgaagaacacgtttatacagagtatgtaaaaatgttaatttatagtttaatcccatggcccacgcacacacgattaattttttttcatctccctttagattgttgtatagaaatttgggtactgtgaactccgccgtagtttccatgggactatataattttgtggcctcgaatacaaattttactacatagttatctatcttaaaaactataccatatcctcctgtagatatgtgataaaaatcgtcgtttataggataaaatcgtttatccttttgttggaaaaatgatgaattaatgtaatcattctcttctatctttagtagtgtttccctattaaaattcttaaaataatttaacaatctaactgacggagcccaattttggtgtaaatctaattgggacattatgttgttaaaatataaacagtctcctaatataacagtatctgataatctatggggagacatccattgatattcaggggatgaatcattggcaacacccatttattgtacaaaaagccccaatttacaaacgaaagtccaggtttgatagagacaaactattaactattttgtctctgtttttaacacctccacagtttttaatttctttggtaatgaaattattcacaatatcagtatcttctttatctaccagagattttactaacttgataaccttggctgtctcattcaatagggtagtaatatttgtatgtgtgatattgatatctttttgaattgtttcttttagaagtgattctttgatggtgtcagcatacgaattacaataatgcagaaactcggttaacatgcaggaattatagtaagccaattccaattgttgcctgtgttgtattagagtgtcaatatgagcaatggtgtccttgcgtttctctgatagaatgcgagcagcgattttggcgttatcatttgacgatatttctggaatgacgaatcctgtttctactaactttttggtaggacaaagtgaaacaatcaagaagatagcttctcctcctatttgtggaagaaattgaactcctctagatgatctactgacgatagtatctccttgacagatattggaccgaattacagaagtacctggaatgtaaagccctgaaaccccctcattttttaagcagattgttgccgtaaatcctgcactgtgaccaagatagagagctcctttggtgaatccatctctatgtttcagtttaaccaagaaacagtcagctggtctaaaatttccatctctatctaatacagcatctaacttgatgtcaggaactatgaccggtttaatgttatatgtaacattgagtaaatccttaagttcataatcatcactgtcatcagttatgtacgatccaaacaatgtttctaccggcatagtggatacgaagatgctatccatcagaatgtttccctgattagtattttctatatagctattcttctttaaacgattttccaaatcagtaactatgttcatttttttaggagtaggacgcctagccagtatggaagaggattttctagatcctctcttcaacatctttgatctcaatggaatgcaaaaccccatagtgaaacaaccaacgataaaaataatattgtttttcactttttataattttaccatctgactcatggattcattaatatctttataagagctactaacgtataattctttataactgaactgagatatatacaccggatctatggtttccataattgagtaaatgaatgctcggcaataactaatggcaaatgtatagaacaacgaaattatactagagttgttaaagttaatattttctatgagctgttccaataaattatttgttgtgactgcgttcaagtcataaatcatcttgatactatccagtaaaccgtttttaagttctggaatattattatcccattgtaaagcccctaattcgactatcgaatatcctgctctgatagcagtttcaatatcgacggacgtcaatactgtaataaaggtggtagtattgtcatcatcgtgataaactactggaatatggtcgttagtaggtacggtaactttacacaacgcgatatataactttccttttgtaccatttttaacgtagttgggacgtcctgcagggtattgttttgaagaaatgatatcgagaacagatttgatacgatatttgttggattcctgattatttactataatataatctagacagatagatgattcgataaatagagaaggtatatcgttggtaggataatacatccccattccagtattctcggatactctattaatgacactagttaagaacatgtcttctattctagaaaacgaaaacatcctacatggactcattaaaacttctaacgctcctgattgtgtctcgaatgcctcgtacaaggatttcaaggatgccatagattctttgaccaacgatttagaattgcgtttagcatctgatttttttattaaatcgaatggtcggctctctggtttgctaccccaatgataacaatagtcttgtaaagataaaccgcaagaaaatttatacgcatccatccaaataaccctagcaccatcggatgatattaatgtattattatagattttccatccacaattattgggccagtatactgttagcaacggtatatcgaatagattactcatgtaacctactagaatgatagttcgtgtactagtcataatatctttaatccaatctaagaaatttaaaattagattttttacactgttaaagttaacaaaggtattacccgggtacgtggatatcatatatggtattggtccattatcagtaatagctccataaactgatacggcgatggtttttatatgtgtttgatctaacgaggaagaaattcgcacccacaattcatctctagatatgtatttaatatcaaacggtaacacatcaatttcgggacgcgtatatgtttctaaatttttaatccaaatataatgatgacctatatgccctattatcatactgtcaactatagtacacctagagaacttacgatacatctgtttcctataatcgttaaattttacaaatctataacatgctaaaccttttgacgacaaccattcattaatttctgatatggaatctgtattctcgataccgtattgttctaaagccagtgctatatctccctgttcgtgggaacgctttcgtataatatcgatcaacggataatctgaagtttttggagaataatatgactcatgatctatttcgtccataaacaatctagacataggaattggaggcgatgatcttaattttgtgcaatgagtcgtcaatcctataacttctaatcttgtaatattcatcatcgacataatactatctatgttatcatcgtatattagtataccatgaccttcttcatttcgtgccaaaatgatatacagtcttaaatagttacgcaatatctcaatagtttcataattgttagctgttttcatcaagatttgtaccctgtttaacatgatggcgttctatacgtttctattttctattttttaaatttttaaatttttaacgatttactgtggctagatacccaatctctctcaaatatttttttagcctcgcttacaagctgtttatctatactattaaaactgacgaatccgtgattttggtaatgggttccgtcgaaatttgccgaagtgatatgaacatattcgtcgtcgactatcaacaattttgtattattctgaatagtgaaaaccttcacagatagatcattttgaacacacaacgcgtctagacttctggcggttgccatagaatatacgtcgttcttatcccaattaccaactagaagtctgatcttaactcctctattaatggctgcttctataatggagttgtaaatatcgggccaatagtagctattaccgtcgacacgtgtagtgggaactatggccaaatgttcaatatctatactagtcttagctgacctgagtttatcaataactacatcggtatctagatctctagaatatcccaataggtgttccggagaatcagtaaagaacactccacctataggattcttaatatgatacgcagtgctaactggcagacaacaagccgcagagcataaattcaaccatgaattttttgcgctattaaaggctttaaaagtatcaaatcttctacgaagatctgtggccagcgggggataatcagaatatacacctaacgttttaatcgtatgtatagatcctccagtaaatgacgcgtttcctacataacatctttcatcatctgacacccaaaaacaaccgagtagtagtcccacattattttttttatctatattaacggttataaaatttatatccgggcagtgactttgtagctctcccagatttcttttccctcgttcatctagcaaaactattattttaatccctttttcagatgcctcttttagtttatcaaaaataagcgctcccctagtcgtactcagaggattacaacaaaaagatgctatgtatatatatttcttagctagagtgataatttcgttaaaacattcaaatgttgttaaatgatcggatctaaaatccatattttctggtagtgtttctaccagcctacattttgctcccgcaggtaccgatgcaaatggccacatttagttaacataaaaacttatacatcctgttctatcaacgattctagaatatcatcggctatatcgctaaaattttcatcaaagtcgacatcacaacctaactcagtcaatatattaagaagttccatgatgtcatcttcgtctatttctatatccgtatccattgtagattgttgaccgattatcgagtttaaatcattactaatactcaatccttcagaatacaatctgtatttcattgtaaatttataggcggtgtatttaagttggtagattttcaattatgtatcaatatagcaacagtagttcttgctcctccttgattctagcatcctcttcattattttcttctacgtacataaacatgtccaatacgttagacaacacaccgacgatggcggccgccacagacacgaatatgactagaccgatgaccatttaaaaacccctctctagctttcacttaaactgtatcgatcattcttttagcacatgtataatataaaaaaacattattctatttcgaatttaggcttccaaaaatttttcatccgtaaaccgataataatatatatagacttgttaatagtcggaataaatagattaatgcttaaactatcatcatctccacgattagagatacaatatttacattctttttgctgtttcgaaactttatcaatacacgttaatacaaacccaggaaggagatattgaaactgaggctgttgaaaatgaaacggtgaatacaataattcagataatgtaaaatcatgattccgtattctgatgatattagaactgctaatggatgtcgatggtatgtatctaggagtatctattttaacaaagcatcgatttgctaatatacaattatcattttgattaattgttattttattcatattcttaaaaggtttcatatttatcaattcttctacattaaaaatttccatttttaatttatgtagccccgcaatactcctcattacgtttcattttttgtctataatatccattttgttcatctcggtacatagattatccaattgagaagcgcatttagtagttttgtacattttaagtttattgacgaatcgtcgaaaactagttatagttaacattttattatttgataccctgatattaatacccctgccgttactattatttataactgatgtaacccacgtaacattggaattaactatcgatagtaatgcatcgacgcttccaaaattgtctattataaactcaccgataatttttttattacatgttttcatattcattaggattatcaaatctttaatcttactacgattgtatgcgttgatattacaagacgtcattctaaaagacggaggatttccatcaaatgccagacaatcacgtacaaagtacatggaaataggttttgttctattgcgcatcatagattcatatagaacacccgtagaaatactaatttgttttactctataaaatactaatgcatctatttcatcgttttgtataacgtctttccaagtgtcaaattccaaatttttttcattgatagtaccaaattcttctatctctttaactacttgcatagataggtaattacagtgatgcctacatgccgttttttgaaactgaatagatgcgtctagaagcgatcgtacgctagtcacaatcaccactttcatatttagaatatatgtatgtaaaaatatagtagaatttcattttgtttttttctatgctataaatgaattctcattttgcatctgctcatactccgttttatatcaataccaaagaaggaagatatctggttctaaaagccgttaaagtatgcgatgttagaactgtagaatgcgaaggaagtaaagcttcctgcgtactcaaagtagataaaccctcatcacccgcgtgtgagagaagaccttcgtccccgtccagatgcgagagaatgaataaccctggaaaacaagtcccgtttatgaggacggacatgctacaaaatatgttcgcggctaatcgcgataatgtagcttctagacttttgaactaaaatacaattatatctttttcgatattaataaatccgtgtcgtccaggttttttatctctttcagtatgtgaatagataggtattttatctctattcatcatcgaatttaagagatccgataaacattgtttgtattctccagatgtcagcatctgatacaacaatatatgtgcacataaacctctggcacttatttcatgtaccttccccttatcactaaggagaatagtatttgagaaatatgtatacatgatattatcatgaattagatatacagaatttgtaacactctcgaaatcacacgatgtgtcggcgttaagatctaatatatcactcgataacacattttcatctagatacactagacattttttaaagctaaaatagtctttagtagtgacagtaactatgcgattattttcatcgatgatacatttcatcggcatattattacgcttaccatcaaagactataccatgtgtatatctaacgtattctagcatagttgccatacgtgcattaaacttttcaggatctttggatagatcttccaatctatctatttgagaaaacatttttatcatgttcaatagttgaaacgtcggatccactatatagatattatctataaagattttaggaactacgttcatggtatcctggcgaatattaaaactatcaatgatatgattatcgttttcatcttttatcaccatatagtttctaagatatgggattttacttaatataatattatttcccgtaataaattttattagaaatgccaaatctataagaaaagtcctcgaattagtttgaagaatatctatatcgccgtaccgtatatttggattaattagatatagagaatatgatccgtaacatatacaacttttattatggcgtctaagatattcttccatcaacttattaacatttttgactagggaagatacattatgacgtcccattacttttgccttgtctattattgcgacgttcatagaatttagcatatctcttgccaattcttccattgatgttacattataagaaattttagatgaaattacatttggagctttaatagtaagaactcctaatatgtccgtgtatgtggtcactaatacagattgtagttctataatcgtaaataatttacctatattatatgtttgagtctgtttagaaaagtagctaagtatacgatcttttatttctgatgcagatgtatcaacatcggaaaaaaatctttttttattcttttttactaaagatacaaatatgtctttgttaaaaacagttattttttgaatatttctagcttgtaattttaacatatgatattcattcacactaggtactctgcctaaataggtttctataatctttaatgtaatattaggaaaagtattctgatcaggattcctattcattttgaggatttaaaactctgattattgtctaatatggtctctacgcaaactttttcacagagcgatagagtttttgataactcgtttttcttaagaaatataaaactactgtctccagagctcgctctatcttttattttatttaattcgatacaaactcctgatactggttcagaaagtaattcattaattttcagtcctttatagaagatatttaatatagataatacaaaatcttcagtttttgatatcgatctgattgatcctagaactagatatattaataacgtgctcattaggcagtttatggcagcttgataattagatatagtatattccagttcatatttattagataccgcattgcccagattttgatattctatgaattcctctgaaaataaatccaaaataactaaacattctattttttgtggattagtgtactctcttccctctatcatgttcactactggtgtccacgatgataaatatctagagggaatataatatagtccataggatgccaatctagcaatgtcgaataactgtaatttgattcttcgttcttcattatgaattgattcttgaggtataaacctaacacaaattatattattagacttttcgtatgtaatgtctttcatgttataagtttttaatcctggaatagaatctattttaatgaggcttttaaacgcagagttctccaacgagtcaaagcataatactctgttgtttttcttatatacgatgttacgattttcttctttgaatggaataggtttttgaattagtttataattacaacataatagataaggaagtgtgcaaatagtacgcggaaaaaacataatagctcccctgttttcatccatggttttaagtaaatgatcactggcttctttagttaatggatattcgaacattaaccgtttcatcatcattggacagaatccatatttcttaatgtaaagagtgatcaaatcattgtgtttattgtaccatcttgttgtaaatgtgtattcggttatcggatctgctcctttttctattaaagtatcgatgtcgatctcgtctaagaattcaactatatcgacatatttcatttgtatacacataaccattactaacgtagaatgtataggaagagatgtaacgggaacagggtttgttgattcgcaaactattctaatacataattcttctgttaatacgtcttgcacgtaatctattatagatgccaagatatctatataattattttgtaagatgatgttaactatgtgatctatataagtagtgtaataattcatgtatttcgatatatgttccaactctgtctttgtgatgtctagtttcgtaatatctatagcatcctcaaaaaatatattcgcatatattcccaagtcttcagttctatcttctaaaaaatcttcaacgtatggaatataataatctattttacctcttctgatatcattaatgatatagtttttgacactatcttctgtcaattgattcttattcactatatctaagaaacggatagcgtccctaggacgaactactgccattaatatctctattatagcttctggacataattcatctattataccagaattaatgggaactattccgtatctatctaacatagttttaagaaagtcagaatctaagacctgatgttcatatattggttcatacatgaaatgatctctattgatgatagtgactatttcattctctgaaaattggtaactcattctatatatgctttccttgttgatgaaggatagaatatactcaatagaatttgtaccaacaaactgttctcttatgaatcgtatatcatcatctgaaataatcatgtaaggcatacatttaacaattagagacttgtctcctgttatcaatatactattcttgtgataatttatgtgtgaggcaaatttgtccacgttctttaattttgttatagtagatatcaaatccaatggagctacagttcttggcttaaacagatatagtttttctggaacaaattctacaacattattataaaggactttgggtagataagtgggatgaaatcctattttaattaatgctatcgcattgtcctcgtgcaaatatccaaacgcttttgtgatagtatggcattcattgtctagaaacgctctacgaatatctgtgacagatatcatctttagagaatatactagtcgcgttaatagtactacaatttgtattttttaatctatctcaataaaaaaattaatatgtatgattcaatgtataactaaactactaactgttattgataactagaatcagaatctaatgatgacgtaaccaagaagtttatctactgccaatttagctgcattatttttagcatctcgtttagattttccatctgccttatcgaatactcttccgtcgatgtctacacaggcataaaatgtaggagagttactaggcccaactgattcaatacgaaaagaccaatctctcttagttatttggcagtactcattaataatggtgacagggttagcatctttccaatcaataatttttttagccggaataacatcatcaaaagacttatgatcctctctcattgatttttcgcgggatacatcatctattatgacgtcagccatagcatcagcatccggcttatccgcctccgttgtcataaaccaacgaggaggaatatcgtcggagctgtacaccatagcactacgttgaagatcgtacagagctttattaacttctcgcttctccatattaagttgtctagttagttgtgcagcagtagctccttcgattccaatgtttttaatagccgcacacacaatctctgcgtcagaacgctcgtcaatatagatcttagacatttttagagagaactaacacaaccagcaataaaactgaacctactttatcatttttttattcatcatcctctggtggttcgtcgtttctatcgaatgtagctctgattaacccgtcatctataggtgatgctggttctggagattctggaggagatggattattatctggaagaatctctgttatttccttgttttcatgtatcgattgcgttgtaacattaagattgcgaaatgctctaaatttgggaggcttaaagtgttgtttgcaatctctacacgcgtgtctaactagtggaggttcgtcagctgctctagtttgaatcatcatcggcgtagtattcctacttttacagttaggacacggtgtattgtatttctcgtcgagaacgttaaaataatcgttgtaactcacatcctttattttatctatattgtattctactcctttcttaatgcattttataccgaataagagatagcgaaggaattctttttcggtgccgctagtacccttaatcatatcacatagtgttttatattccaaatttgtggcaatagacggtttatttctatacgatagtttgtttctggaatcctttgagtattctataccaatattattctttgattcgaatttagtttcttcgatattagattttgtattacctatattcttgatgtagtactttgatgatttttccatggcccattctattaagtcttccaagttggcatcatccacatattgtgatagtaattctcggatatcagtagcggctaccgccattgatgtttgttcattggatgagtaactactaatgtatacattttccatttataacacttatgtattaactttgttcatttatattttttcattattatgttgatattaacaaaagtgaatatatatgttaataattgtattgtggttatacggctacaatttcataatgagtggaagtcagtgtccgatgatcaatgacgatagctttactctgaaaagaaagtatcaaatcgatagtgcggagtcaacaatgaaaatggataagaagaggacaaagtttcagaatagagccaaaatggtaaaagaaataaatcagacaataagagcagcacaaactcattacgagacattgaaactaggatacataaaatttaagagaatgattaggactactactctagaagatatagcaccatctattccaaataatcagaaaacttataaactattctcggacatttcagccatcggcaaagcatcacagaatccgagtaagatggtatatgctctgctgctttacatgtttcccaatttgtttggagatgatcatagattcattcgttatagaatgcatccaatgagtaaaatcaaacacaagatcttctctcctttcaaacttaatcttattagaatattagtggaagaaagattctataataatgaatgcagatctaataaatggagaataattggaacacaagttgataaaatgttgatagctgaatctgataaatatacaatagatgcaaggtataacctaaaacccatgtatagaatcaagggaaaatctgaagaagataccctcttcatcaaacagatggtagaacaatgtgtgacatcccaggaattggtggaaaaagtgttgaagatactgtttagagatttgttcaagagtggagaatacaaagcgtacagatacgatgatgatgtagaaaatggatttattggattggatacactaaaattaaacattgttcatgatatagttgaaccatgtatgcctgttcgtaggccagtggctaagatactgtgtaaagaaatggtaaataaatactttgagaatccgctacatattattggtaaaaatcttcaagagtgcattgactttgttagtgaataggcatttcatctttctccaatactaattcaaattgttaaattaataatggatagtataaatagttattagtgataaaatagtaaaaataattattagaataagagtgtagtatcatagataactctcttctataaaaatggattttattcgtagaaagtatcttatatacacagtagaaaataatatagattttttaaaggatgatacattaagtaaagtaaacaattttaccctcaatcatgtactagctctcaagtatctagttagcaattttcctcaacacgttattactaaggatgtattagctaataccaatttttttgttttcatacatatggtacgatgttgtaaagtgtacgaagcggttttacgacacgcatttgatgcacccacgttgtacgttaaagcattgactaagaattatttatcgtttagtaacgcaatacaatcgtacaaggaaaccgtgcataaactaacacaagatgaaaaatttttagaggttgccgaatacatggacgaattaggagaacttataggcgtaaattatgacttagttcttaatccattatttcacggaggggaacccatcaaagatatggaaatcatttttttaaaactgtttaagaaaacagacttcaaagttgttaaaaaattaagtgttataagattacttatttgggcttacctaagcaagaaagatacaggcatagagtttgcggataatgatagacaagatatatacactctatttcaacaaactggtagaatcgtccatagcaatctaacagaaacgtttagagattatatctttcccggagataagactagctattgggtgtggttaaacgaaagtatagctaatgatgcggatattgttcttaatagacacgccattaccatgtatgataaaattcttagttatatatactctgagataaaacaaggacgcgttaataaaaacatgcttaagttagtttatatctttgagcctgaaaaagatatcagagaacttctgctagaaatcatatatgatattcctggagatatcctatctattattgatgcaaaaaacgacgattggaaaaaatattttattagtttttataaagctaattttattaacggtaatacatttattagtgatagaacgtttaacgaggacttattcagagttgttgttcaaatagatcccgaatatttcgataatgaacgaattatgtctttattctctacgagtgctgcggacattaaacgatttgatgagttagatattaataacagttatatatctaatataatttatgaggtgaacgatatcacattagatacaatggatgatatgaagaagtgtcaaatctttaacgaggatacgtcgtattatgttaaggaatacaatacatacctgtttttgcacgagtcggatcccatggtcatagagaacggaatactaaagaaactgtcatctataaaatccaagagtaaacggctgaacttgtttagcaaaaacattttaaaatattatttagacggacaattggctcgtctaggtcttgtgttagatgattataaaggagacttgttagttaaaatgataaaccatcttaagtctgtggaggatgtatccgcattcgttcgattttctacagataaaaaccctagtattcttccatcgctaatcaaaactattttagctagttataatatttccatcatcgtcttatttcaaaggtttttgagagataatctatatcatgtagaagaattcttggataaaagcatccatctaaccaagacggataagaaatatatacttcaattgataagacacggtagatcatagaacagaccaaatatattattaataatttggtatatacatagatattaattatcacatattaaaaattcacacatttttgataaatgggaactgctgcaacaattcagactcccaccaaattaatgaataaagaaaatgcagaaatgattttggaaaaaattgttgatcatatagttatgtatattagtgacgaatcaagtgattcagaaaataatcctgaatatattgattttcgtaacagatacgaagactatagatctctcattataaaaagtgatcacgagtttgtaaagctatgtaaaaatcatgcagagaaaagttctccagaaacgcaacaaatgattatcaaacacatatacgaacaatatcttattccagtatctgaagtactattaaaacctataatgtccatgggtgacataattacatataacggatgtaaagacaatgaatggatgctagaacaactctctaccctaaactttaacaatctccgcacatggaactcatgtagcataggcaatgtaacgcgtctgttttatacattttttagttatctgatgaaagataaactaaatatataagtataatcccattctaatactttaacctgatgtattagcatcttattagaatattaacctaactaaaagacataacataaaaactcattacatagttgataaaaagcggtaggatataaatattatggctgccaccgttccgcgttttgacgacgtgtacaaaaatgcacaaagaagaattctagatcaagaaacattttttagtagaggtctaagtagaccgttaatgaaaaacacatatctatttgataattacgcgtatggatggataccagaaactgcaatttggagtagtagatacgcaaacttagatgcaagtgactattatcccatttcgttgggattacttaaaaagttcgagtttctcatgtctctatataaaggtcctattccagtatacgaagaaaaagtaaatactgaattcatagccaatggatcgttctctggtagatacgtatcatatcttcgaaagttttctgctcttccaacaaacgagtttattagttttttattattgacctccatccctatctataatatcttattctggtttaaaaacacacagtttgatattactaaacacacattattcagatacgtctatacagataatgccaaacacctggcgttggctaggtatatgcatcaaacaggagactataagcctttgtttagtcgtctcaaagagaattatatatttaccggtcccgttccaatatgtatcaaagatatagatcaccctaatcttagtagagcaagaagtccatccgattatgagacattagctaatattagtactatattgtactttaccaagtatgatccggtattaatgtttttattgttttacgtacctgggtattcaattactacaaaaattactccagccgtagaatatctaatggataaactgaatctaacaaagagcgacgtacaactgttgtaaattattttatgcttcgtaaaatgtaggttttgaaccaaacattctttcaaagaatgagatgcataaaactttattatccaatagattgactatttcggacgtcaatcgtttaaagtaaacttcgtaaaatattctttgatcactgccgagtttaaaacttctatcgataattgtctcatatgttttaatatttacaagttttttggtccatggtacattagccggacaaatatatgcaaaataatatcgttctccaagttctatagtttctggattatttttattatattcagtaaccaaatacatattagggttatctgcggatttataatttgagtgatgcattcgactcaacataaataattctagaggagacgatctactatcaaattcggatcgtaaatctgtttctaaagaacggagaatatctatacatacctgattagaattcatccgtccttcagacaacatctcagacagtctggtcttgtatgtcttaatcatattcttatgaaacttggaaacatctcttctagtttcactagtacctttattaattctctcaggtacagattttgaattcgacgatgctgagtatttcatcgttgtatatttcttcttcgattgcataatcagattcttatataccgcctcaaactctattttaaaattattaaacaatactctattattaatcagtcgttctaactctttcgctatttctatagacttatcgacatcttgactgtctatctctgtaaacacggagtcggtatctccatacacgctacgaaaacgaaatctgtaatctataggcaacgatgttttcacaatcggattaatatctctatcgtccatataaaatggattacttaatggattggcaaaccgtaacataccgttagataactctgctccatttagtaccgattctagatacaagatcattctacgtcctatggatgtgcaactcttagccgaagcgtatgagtatagagcactatttctaaatcccatcagaccatatactgagttggctactatcttgtacgtatattgcatggaatcatagatggccttttcagttgaactggtagcctgttttaacatctttttatatctggctctctctgccaaaaatgttcttaatagtctaggaatggttccttctatcgatctatcgaaaattgctatttcagagatgaggttcggtagtctaggttcacaatgaaccgtaatatatctaggaggtggatatttctgaagcaatagctgattatttatttcttcttccaatctattggtactaacaacgacaccgactaatgtttccggagatagatttccaaagatacacacattaggatacagactgttataatcaaagattaatacattattactaaacattttttgttttggagcaaataccttaccgccttcataaggaaacttttgttttgtttctgatctaactaagatagttttagtttccaacaatagctttaacagtggacccttgatgactgtactcgctctatattcgaataccatggattgaggaagcacatatgttgacgcacccgcgtctgtttttgtttctactccataatactcccacaaatactgacacaaacaagcatcatgaatacagtatctagccatatctaaagctatgtttagattataatccttatacatctgagctaaatcaacgtcatcctttccgaaagataatttatatgtatcattaggtaaagtaggacataatagtacgactttaaatccattttcccaaatatctttacgaattactttacatataatatcctcatcaacagtcacataattacctgtggttaaaacctttgcaaatgcagcggctttgcctttcgcgtctgtagtatcgtcaccgataaacgtcatttctctaactcctctatttaatactttacccatgcaactgaacgcgttcttggatatagaatccaatttgtacgaatccaatttttcagatttttgaatgaatgaatatagatcgaaaaatatagttccattattgttattaacgtgaaacgtagtattggccatgccgcctactcccttatgactagactgatttctctcataaatacagagatgtacagcttcctttttgtccggagatctaaagataatcttctctcctgttaataactctagacgattagtaatatatctcagatcaaagttatgtccgttaaaggtaacgacgtagtcgaacgttagttccaacaattgtttagctattcgtaacaaaactatttcagaacatagaactagttctcgttcgtaatccatttccattagtgactgtatcctcaaacatcctctatcgacggcttcttgtatttcctgttccgttaacatctcttcattaatgagcgtaaacaataatcgtttaccacttaaatcgatataacagtaacttgtatgcgagattgggttaataaatacagaaggaaacttcttatcgaagtgacactctatatctagaaataagtacgatcttgggatatcgaatctaggtatttttttagcgaaacagttacgtggatcgtcacaatgataacatccattgttaatctttgtcaaatattgctcgtccaacgagtaacatccgtctggagatatcccgttagaaatataaaaccaactaatattgagaaattcatccatggtggcattttgtatgctgcgtttctttggctcttctatcaaccacatatctgcgacggagcattttctatctttaatatctagattataacttattgtctcgtcaatgtctatagttctcatctttcccaacggcctcgcattaaatggaggaggagacaatgactgatatatttcgtccgtcactacgtaataaaagtaatgaggaaatcgtataaatacggtctcaccatttcgacatctggatttcagatataaaaatctgttttcaccgtgactttcaaaccaattaatgcaccgaacatccatttatagaatttagaaatatattttcatttaaatgaatcccaaacattggggaagagccgtatggaccattatttttatagtactttcgcaagcgggtttagacggcaacatagaagcgtgtaaacgaaaactatatactatagttagcactcttccatgtcctgcatgtagacggcacgcgactattgctatagaggacaataatgtcatgtctagcgatgatctgaattatatttattattttttcatcagattatttaacaatttggcatctgatcccaaatacgcaatcgatgtgtcaaaggttaaacctttataaacttaacccattataaaacttatgattagtcacgactgaaataaccgcgtgattattttttggtataattctacacggcatggtttctgtgactatgaattcaacccccgttacattagtgaaatctttaacaaacagcaagggttcgtcaaagacataaaactcattgtttacaatcgaaatagaccccctatcacacttaaaataaaaaatatccttatcctttaccaccaaataaaattctgattggtcaatgtgaatgtattcacttaacagttccacaaatttatttattaactccgaggcacatacatcgtcggtattttttatggcaaactttactcttccagcatccgtttctaaaaaaatattaacgagttccatttatatcatccaatattattgaaatgacgttgatggacagatgatacaaataagaaggtacggtacctttgtccaccatctcctccaattcatgctctattttgtcattaactttaatgtatgaaaacagtacgccacatgcttccatgacagtgtgtaacactttggatacaaaatgtttgacattagtataattgtttaagactgtcaatctataatagatagtagctataatatattctatgatggtattgaagaagatgacaatcttggcatattgatcatttaacacagacatggtatcaacagatagcttgaatgaaagagaatcagtaattggaataagcgtcttctcgatggagtgtccgtataccaacatgtctgatattttgatgtattccattaaattatttagttttttctttttattctcgttaaacagcatttctgtcaacggaccccaacatcgttgaccgattaagttttgattgatttttccgtgtaaggcgtatctagtcagatcgtatagcctatccaataatccatcatctgtgcgtagatcacatcgtacactttttaattctctatagaagagcgacagacatctggaacaattacagacagcaatttctttattctctacagatgtaagatacttgaagacattcctatgatgatgcagaattttggataacacggtattgatggtatctgttaccataattcctttgatggctgatagtgtcagagcacaagatttccaatctttgacaatttttagcaccattatctttgttttgatatctatatcagacagcatggtgcgtctgacaacacagggattaagacggaaagatgaaatgattctctcaacatcttcaatggataccttgctattttttctggcattatctatatgtgcgagaatatcctctagagaatcagtatcctttttgatgatagtggatctcaatgacatgggacgtctaaaccttcttattctatcaccagattgcatggtgatttgtcttctttcttttatcataatgtaatctctaaattcatcggcaaattgtctatatctaaaatcataatatgagatgtttacctctacaaatatctgttcgtccaatgttagagtatctacatcagttttgtattccaaattaaacatggcaacggatttaattttatattcctctattaagtcctcgtcgataataacagaatgtagataatcatttaatccatcgtacatggttggaagatgcttgttgacaaaatctttaattgtcttgatgaaggtgggactatatctaacatcttgattaataaaatttataacattgtccataggatactttgtaactagttttatacacatctcttcatcggtaagtttagacagaatatcgtgaacaggtggtatattatattcatcagatatacgaagaacaatgtccaaatctatattgtttaatatattatatagatgtagtgtagctcctacaggaatatctttaactaagtcaatgatttcatcaaccgttagatctattttaaagttaatcatataggcattgatttttaaaaggtatgtagccttgactacattctcattaattaaccattccaagtcactgtgtgtaagaagattatattctatcataagcttgactacatttggtcccgataccattaaagaattcttatgatataaggaaacagcttttaggtactcatctactctacaagaattttggagagccttaacgatatcagtgacgtttattatttcaggaggaaaaaacctaacattgagaatgtcggagttaatagcttccagatacagtgattttggcaatagtccgtgtaatccataatccagtaacacgagctggtgcttgctagacaccttttcaatgtttaatttttttgaaataagctttgataaagccttcctcgcaaattccggatacatgaacatgtcggcgacatgattaagtattgttttttcattatttttatattttctcaacaagttctcaataccccaatagatgatagaatatcacccaatgcgtccatgttgtctatttccaacaggtcgctatatccaccaatagaagttttcccaaaaaagattctaggaacagttctaccaccagtaatttgttcaaaataatcccgcaattcattttcgggtttaaattctttaatatcgacaatttcatacgctcctcttttgaaactaaacttatttagaatatccagtgcatttctacaaaaaggacatgtatacttgacaaaaattgtcactttgttattggccaacctttgttgtacaaattcctcggccattttaatatttaagtgatataaaactatctcgacttatttaactctttagtcgagatatatggacgcagatagctatatgatagccaactacagaaggcaaacgctataaaaaacataattacgacgagcatatttataaatatttttattcagcattacttgatatagtaatattaggcacagtcaaacattcaaccactctcgatacattaactctctcattttctttaacaaattctgcaatatcttcgtaaaaagattcttgaaactttttagaatatctatcgactctagatgaaatagcgttcgtcaacatactatgttttgtatacataaaggcgcccattttaacagtttctagtgacaaaatgctagcgatcctaggatcctttagaatcacatagattgacgattcgtctctcttagtaactctagtaaaataatcatacaatctagtacgcgaaataatattatccttgacttgaggagatctaaacaatctagttttgagaacatcgataagttcatcgggaatgacatacatactatctttaatagaactcttttcatccagttgaatggattcgtccttaaccaactgattaatgagatcttctattttatcattttccagatgatatgtatgtccattaaagttaaattgtgtagcgcttctttttagtctagcagccaatactttaacatcactaatatcgatatacaaaggagatgatttatctatggtattaagaattcgtttttcgacatccgtcaaaaccaattcctttttgcctgtatcatccagttttccatcctttgtaaagaaattattttctactagactattaataagactgataaggattcctccataattgcacaatccaaactttttcacaaaactagactttacgagatctacaggaatgcgtacttcaggtttcttagcttgtgattttttcttttgcggacattttcttgtgaccaactcatctaccatttcattgattttagcagtgaaataagctttcaatgcacgggcactgatactattgaaaacgagttgatcttcaaattccgccatttaagttcaccaaacaacttttaaatacaaatatatcaatagtagtagaataagaactataaaaaaaataataattaaccaataccaaccccaacaaccggtattattagttgatgtgactgttttctcatcacttagaacagatttaacaatttctataaagtctgtcaaatcatcttccggagaccccataaatacaccaaatatagcggcgtacaacttatccatttatacattgaatattggcttttctttatcgctatcttcatcatattcatcatcaatatcaacaagtcccagattacgagccagatcttcttctacattttcagtcattgatacacgttcactatctccagagagtccgataacgttagccaccacttctctatcaatgattagtttcttgagtgcgaatgtaatttttgtttccgttccggatctatagaagacgataggtgtgataattgccttggccaattgtctttctcttttactgagtgattctagttcaccttctatagatctgagaatggatgattctccagccgaaacatattctaccatggctccgtttaatttgttgatgaagatggattcatccttaaatgttttctctgtaatagtttccaccgaaagactatgcaaagaatttggaatgcgttccttgtgcttaatgtttccatagacggcttctagaagttgatacaacataggactagccgcggtaacttttatttttagaaagtatccatcgcttctatcttgtttagatttatttttataaagtttagtctctccttccaacataataaaagtggaagtcatttgactagataaactatcagtaagttttatagagatagacgaacaattagcgtattgagaagcatttagtgtaacgtattcgatacattttgcattagatttactaatcgattttgcatactctataacacccgcacaagtctgtagagaatcgctagatgcagtaggtcttggtgaagtttcaactctcttcttgattaccttactcatgattaaacctaaataattgtactttgtaatataatgatatatattttcactttatctcatttgagaataaaaatgtttttgtttaaccactgcatgatgtacagatttcggaatcgcaaaccaccagtggttttattttatccttgtccaatgtgaattgaatgggagcggatgcgggtttcgtacgtagatagtacattcccgtttttagaccgagactccatccgtaaaaatgcatactcgttagtttggaataactcggatctgctatatggatattcatagattgactttgatcgatgaaggctcccctgtctgcagccatttttatgatcgtcttttgtggaatttcccaaatagttttataaactcgcttaatatcttctggaaggtttgtattctgaatggatccaccatctgccataatcctattcttgatctcatcattccataattttctctcggttaaaactctaaggagatgcggattaactacttgaaattctccagacaatactctccgagtgtaaatattactggtatacggttccaccgactcattatttcccaaaatttgagcagttgatgcagtcggcataggtgccaccaataaactatttctaagaccgtatgttctgattttatcttttagaggttcccaattccaaagatccgacggtacaacattccaaagatcatattgtagaataccgttactggcgtacgatcctacatatgtatcgtatggtccttccttctcagctagttcacaactcgcctctaatgcaccgtaataaatggtttcgaagatcttcttatttagatcttgtgcttccaggctatcaaatggataatttaagagaataaacgcgtccgctaatccttgaacaccaataccgataggtctatgtctcttattagagatttcagcttctggaataggataataattaatatctataattttattgagatttctgacaattactttgaccacatccttcagtttgagaaaatcaaatcgcccatctattacaaacatgttcaaggcaacagatgccagattacaaacggctacctcattagcatccgcatattgtattatctcagtgcaaagattactacacttgatagttcctaaattttgttgattactctttttgttacacgcatccttataaagaatgaatggagtaccagtttcaatctgagattctataatcgctttccagacgactcgagcctttattatagatttgtatctcctttctctttcgtatagtgtatacaatcgttcgaactcgtctccccaaacattgtccaatccaggacattcatccggacacatcaacgaccactctccgtcatccttcactcgtttcataaagagatcaggaatccaaagagctataaatagatctctggttctatgttcctcgtttcctgtattctttttaagatcgaggaacgccataatatcagaatgccacggttccaagtatatggccataactccaggccgtttgtttcctccctgatctatgtatctagcggtgttattataaactctcaacattggaataataccgtttgatataccattggtaccggagatatagcttccactggcacgaatattactaattgatagacctattccccctgccattttagagattaatgcgcatcgttttaacgtgtcatagataccctctatgctatcatcgatcatgttaagtaaaaaacagctagacatttggtgacgactagttcccgcattaaataaggtaggagaagcgtgcgtaaaccatttttcagaaagtagattgtacgtctcaatagctgagtctatatcccattgatgaattcctactgcgacacgcattaacatgtgctgaggtctttcaacgatcttgttgtttattttcaacaagtaggatttttccaaagttttaaaaccaaaatagttgtatgaaaagtctcgttcgtaaataataaccgagttgagtttatccttatatttgttaactatatccatggtgatacttgaaataatcggagaatgtttcccatttttaggattaacatagttgaataaatcctccatcacttcactaaatagtttttttgtttccttgtgtagatttgatacggctattctggcggctagaatggcataatccggatgttgtgtagtacaagtggctgctatttcggctgccagagtgtccaattctaccgttgttactccattatatattccttgaataaccttcatagctattttaataggatctatatgatccgtgtttaagccataacataattttctaatacgagacgtgattttatcaaacatgacattttccttgtatccatttcgtttaatgacaaacatttttgttggtgtaataaaaaaattatttaacttttcattaatagggatttgacgtatgtagcgtacaaaattatcgttcctggtatatagataaagagtcctatatatttgaaaatcgttacggctcgattaaactttaatgattgcatagtgaatatatcattaggatttaactccttgactatcatggcggcgccagaaattaccatcaaaagcattaatacagttatgccgatcgcagttagaacggttatagcatccaccatttatatctaaaaattagatcaaagaatatgtgacaaagtcctagttgtatactgagaattgacgaaacaatgtttcttacatatttttttcttattagtaactgacttaatagtaggaactggaaagctagacttgattattctataagtatagatacccttccagataatgttctctttgataaaagttccagaaaatgtagaattttttaaaaagttatcttttgctattaccaagattgtgtttagacgcttattattaatatgagtaatgaaatccacaccgcctctagatatcgcctttatttccacattagatggtaaatccaatagtgaaactatctttttaggaatgtatggactcgcgtttagaggagtgaacgtcttgggcgtcggaaaggatgattcgtcaaacgaataaacaatttcacaaatggatgttaatgtattagtaggaaatttcttgacgctagtggagttgaagattctaatggatgatgttctacctatttcatccgataacatgttaatttccgacaccaacggttttaatatttcgatgatatacggtagtctctctttcggacttatatagcttattccacaatacgagtcattatatactccaaaaaacaaaataactagtataaaatctgtatcgaatgggaaaaacgaaattatcgacataggtatagaatccggaacattgaacgtattaatacttaattctttttctgtggtaagtaccgataggttattgacattgtatggttttaaatattctataacttgagacttgatagatattagtgatgaattgaaaattatttttatcaccacgtgtgtttcaggatcatcgtcgacgcccgtcaaccaaccgaatggagtaaaataaatatcattaatatatgctctagatattagtatttttatcaatcctttgattatcatcttctcgtaggcgaatgattccatgatcaagagtgatttaagaacatcctccggagtattaatgggcttagtaaacagtccatcgttgcaataataaaagttatccaagttaaaggatattatgcattcgtttaaagatatcacctcatctgacggagacaattttttggtaggttttagagactttgaagctacttgtttaacaaagttattcatcgtcgtctactattctatttaattttgtagttaatttatcacatatcacattaattgactttttggtccatttttccatacgtttatattcttttaatcctgcgttatccgtttccgttatatccagtgatagatcgtgcaggttaaatagaatgctcttaaataatgtcatttttttatccgctaaaaatttaaagaatgtataaacctttttcagagatttgaaactcttaggtggtgtcctagtacacaatatcataaacaaactaataaacattccacattcagattccaacagctgattaacttccacattaatacagcctattttcgctccaaatgtacattcgaaaaatctgaataaaacatcgatgtcacaatttgtattatccaatacagaatgtctgtgattcgtgttaaaaccatcggagaaggaatagaaataaaaattattatagtggtggaattcagttggaatattgcctccggagtcataaaaggatactaaacattgttttttatcataaattacacatttccaatgagacaaataacaaaatccaaacattacaaatctagaggtagaacttttaattttgtctttaagtatatacgataagatatgtttattcataaacgcgtcaaatttttcatgaatcgctaaggagtttaagaatctcatgtcaaattgtcctatataatccacttcggatccataagcaaactgagagactaagttcttaatacttcgattgctcatccaggctcctctctcaggctctattttcatcttgacgacctttggattttcaccagtatgtattcctttacgtgataaatcatcgattttcaaatccatttgtgagaagtctatcgccttagatactttttcccgtagtcgaggtttaaaaaaatacgctaacggtatactagtaggtaactcaaagacatcatatatagaatggtaacgcgtctttaactcgtcggttaactctttcttttgatcgagttcgtcgctactattgggtctgctcaggtgccccgactctactagttccaacatcataccgataggaatacaagacactttgccggcggttgtagatttatcatatttctccactacatatccgttacaatttgttaaaaatttagatacatctatattgctacataatccagctagtgaatatatatgacataataaattggtaaatcctagttctggtattttactaattactaaatctgtatatctttccatttatcatggaaaagaatttaccagatatcttcttttttccaaactgcgttaatgtattctcttacaaatattcacaagatgaattcagtaatatgagtaaaacggaacgtgatagtttctcattggccgtgtttccagttataaaacatagatggcataacgcacacgttgtaaaacataaaggaatatacaaagttagtacagaagcacgtggaaaaaaagtatctcctccatcactaggaaaacccgcacacataaacctaaccacgaaacaatatatatacagtgaacacacaataagctttgaatgttatagttttctaaaatgtataacaaatacagaaatcaattcgttcgatgagtatatattaagaggactattagaagctggtaatagtttacagatattttccaattccgtaggtaaacgaacagatactataggtgtactagggaataagtatccatttagcaaaattccattggcctcattaactcctaaagcacaacgagagatattttcagcgtggatttctcatagacctgtagttttaactggaggaactggagtgggtaagacgtcacaggtacccaagttattgctttggtttaattatttatttggtggattctctactctagataaaatcactgactttcacgaaagaccagtcattctatctcttcctaggatagctttagttagattgcatagcaataccattttaaaatcattgggatttaaggtactagatggatctcctatttctttacggtacggatctataccggaagaattaataaacaaacaaccaaaaaaatatggaattgtattttctacccataagttatctctaacaaaactatttagttatggcactcttattatagacgaagttcatgagcatgatcaaataggagatattattatagcagtagcgagaaagcatcatacgaaaatagattctatgtttttaatgactgccacgttagaggatgacagggaacggctaaaagtatttttacctaatcccgcatttatacatattcctggagatacactgtttaaaattagcgaggtatttattcataataagataaatccatcttccagaatggcatacatagaagaagaaaagagaaatttagttactgctatacagatgtatactcctcctgatggatcatccggtatagtctttgtggcatccgttgcacagtgtcacgaatataaatcatatttagaaaaaagattaccgtatgatatgtatattattcatggtaaggtcttagatatagacgaaatattagaaaaagtgtattcatcacctaatgtatcgataattatttctactccttatttggaatccagcgttactatacgcaatgttacacacatttatgatatgggtagagtttttgtccccgctccttttggaggatcgcaagaatttatttctaaatctatgagagatcaacgaaaaggaagagtaggaagagttaatcctgggacatacgtatatttctatgatctgtcttatatgaagtctatacagcgaatagattcagaatttctacataattatatattgtacgctaataagtttaatctaacactccccgaagatttgtttataatccctacaaatttggatattctatggcgtacaaaggaatatatagactcgttcgatattagtacagaaacatggaataaattattatccaattattatatgaagatgatagagtatgctaaactttatgtactaagtcctattctcgctgaggagttggataactttgagaggacgggagaattaactagtattgtacgagaagccattttatctctaaatttacgaattaagattttaaattttaaacataaagatgatgatacgtatatacacttttgtaaaatattattcggtgtctataacggaacaaacgctactatatattatcatagacctctaacgggatatatgaatatgatttcagatactatatttgttcctgtagataataactaaaaatcaaactctaatgaccacatctttttttagagatgaaaaattttccacatctccttttgtagacacgactaaacattttgcagaaaaaagtttattagtgtttagataatcgtatacttcatcagtgtagatagtaaatgtgaacagataaaaggtattcttgctcaatagattggtaaattccatagaatatattaatcctttcttcttgagatcccacatcatttcaaccagagacgttttatccaatgatttacctcgtactataccacatacaaaactagattttgcagtgacgtcgtacctggtattcctaccaaacaaaattttacttttagttcttttagaaaattctaaggtagaatctctatttgccaatatgtcatctatggaattaccactagcaaaaaatgatagaaatatatattgatacatcgcagctggttttgatctactatactttaaaaacgaatcagattccataattgcctgtatatcatcagctgaaaaactatgttttacacgtattccttcggcatttctttttaatgatatatcttgtttagacaatgataaagttatcatgtccatgagagacgcgtctccgtatcgtataaatatttcattagatgttagacgcttcattaggggtatacttctataaggtttcttaatcagtccatcattggttgcgtcaagaactactatcggatgttgttgggtatctctagtgttacacatggccttactaaagtttgggtaaataactatgatatctctattaattatagatgcatatatttcattcgtcaaggatattagtatcgacttgctatcgtcattaatacgtgtaatgtaatcatataaatcatgcgatagccaaggaaaattcaaatagatgttcatcatataatcgtcgctataattcatattaatactttgacattgactaatttgtaatatagcctcgccacgaagaaagctctcgtattcagtttcatcgataaaggataccgttaaatataactggttgccgatagtctcatagtctattaagtggtaagtttcgtacaaatacagaatccctaaaatattatctaatgttggattaatctttaccataactgtataaaatggagacggagtcataactattttaccgtttgtacttactggaatagatgaaggaataatctccggacatgctggtaaagacccaaatgtctgtttgaagaaatccaatgttccaggtcctaatctcttaacaaaaattacgatattcgatcccgatatcctttgcattctatttaccagcatatcacgaactatattaagattatctatcatgtctattctcccaccgttatataaatcgcctccgctaagaaacgttagtatatccatacaatggaatacttcatttctaaaatagtattcgttttctaattctttaatgtgaaatcgtatactagaaagggaaaaattatctttgagttttccgttagaaaagaaccacgaaactaatgttctgattgcgtccgattccgttgctgaattaatggatttacaccaaaaactcatataacttctagatgtagaagcattcgctaaaaaattagtagaatcaaaggatataagtagatgttccaacaagtgagcaattcccaagatttcatctatatcattctcgaatccgaaattagaaattcccaagtagatatcctttttcatccgatcattgatgaaaatacgaactttattcggtaagacaatcatttactaaggagtaaaataggaagtaatgttcgtatgtcgttatcatcgtataaattaaaggtgtgttttttaccattaagtgacattataattttaccaatattggaattataatataggtgtatttgcgcactcgcgacggttgatgcatcggtaaatatagctgtatctaatgttctagtcggtatttcatcatttcgctgtctaataatagcgttttctctatctgtttccattacagctgcctgaagtttattggtcggataatatgtaaaataataagaaatacatacgaataacaaaaataaaataagatataataaagatgccatttagagatctaattttgttcaacttgtccaaattcctacttacagaagatgaggaatcgttggagatagtgtcttccttatgtagaggatttgaaatatcttatgatgacttgataacttactttccagataggaaataccataaatatatttctaaagtatttgaacatgtagatttatcggaggaattaagtatggaattccatgatacaactttgcgagatttagtttatcttagattgtacaagtattccaagtgtatacggccgtgttataaattaggagataatctaaaaggcatagttgttataaaggacaggaatatttatattagggaagcaaatgatgacttgatagaatatctcctcaaggaatacactcctcagatttatacatattctaatgagcgcgtccccataactggttcaaaattaattctttgtggattttctcaagttacatttatggcgtatacaacgtcgcatataacaacaaataaaaaggtagatgttctcgtttccaaaaaatgtatagatgaactagtcgatccaataaattatcaaatacttcaaaatttatttgataaaggaagcggaacaataaacaaaatactcaggaagatattttattcggtaacaggtggccaaactccataggtagctttttctatttcggattttagaatttccaaattcaccagcgatttatcggttttggtgaaatccaaggatttattaatgtccacaaatgccatttgttttgtctgtggattgtatttgaaaatggaaacgatgtagttagatagatgcgctgcgaagtttcctattagggttccgcgcttcacgtcacccagcatacttgaatcaccatcctttaaaaaaaatgataagatatcaacatggagtatatcatactcggattttaattcttctactgcatcactgacattttcacaaatactacaatacggtttaccgaaaataatcagtacgttcttcatttatgggtatcaaaaacttaaaatcgttactgctggaaaataaatcactgacgatattagatgataatttatacaaagtatacaatggaatatttgtggatacaatgagtatttatatagccgtcgccaattgtgtcagaaacttagaagagttaactacggtattcataaaatacgtaaacggatgggtaaaaaagggagggcatgtaaccctttttatcgatagaggaagtataaaaattaaacaagacgttagagacaagagacgtaaatattctaaattaaccaaggacagaaaaatgctagaattagaaaagtgtacatccgaaatacaaaatgttaccggatttatggaagaagaaataaaggcagaaatgcaattaaaaatcgataaactcacatttcaaatatatttatctgattctgataacataaaaatatcattgaatgagatactaacacatttcaacaataatgagaatgttacattattttattgtgatgaacgagacgcagaattcgttatgtgtctcgaggctaaaacacatttctctaccacaggagaatggccgttgataataagtaccgatcaggatactatgctatttgcatctactgataatcatcctaagatgataaaaaacttaactcaactgtttaaatttgttccctcggcagaggataactatttagcaaaattaacggcgttagtgaatggatgtgatttctttcctggactctatggggcatctataacacccaacaacttaaacaaaatacaattgtttagtgattttacaatcgataatatagtcactagtttggcaattaaaaattattatagaaagactaactctaccgtagacgtgcgtaatattgttacgtttataaacgattacgctaatttagacgatgtctactcgtatgttcctccttgtcaatgcactgttcaagaatttatattttccgcattagatgaaaaatggaacaattttaaatcatcttatttagagaccgttccgttaccctgtcaattaatgtacgcgttagaaccacgcaaggagattgatgtttcagaagttaaaactttatcatcttatatagatttcgaaaatactaaatcagatatcgatgttataaaatctatatcctcgatcttcggatattctaacgaaaactgtaacacgatagtattcggcatctataaggataatttactactgagtataaataattcattttactttaacgatagtctgttaataaccaatactaaaagtgataatataataaatataggttactagattaaaaatggtgttccaactcgtgtgctctacatgcggtaaagatatttctcacgaacgatataaattgattatacgaaaaaaatcattaaaggatgtactcgtcagtgtaaagaacgaatgttgtaggttaaaattatctacacaaatagaacctcaacgtaacttaacagtgcaacctctattggatataaactaatatggatccggttaattttatcaagacatatgcgcctagaggttctattatttttattaattataccatgtcattaacaagtcatttgaatccatcgatagaaaaacatgtgggtatttattatggtacgttattatcggaacacttggtagttgaatctacctatagaaaaggagttcgaatagtcccattggatagtttttttgaaggatatcttagtgcaaaagtatacatgttagagaatattcaagttatgaaaatagcagctgatacgtcattaactttattgggtattccgtatggatttggtcataatagaatgtattgttttaaattggtagctgactgttataaaaatgccggtgttgaaacatcgtctaaacgaatattaggtaaagatatttttctgagccaaaacttcacagacgataatagatggataaagatatatgattctaataatttaacattttggcaaattgattaccttaaagggtgagttaatatgcataactactcctccgttgttttttcccacgttctttttcttaacgttgtttgccatcactctcataatgtaaagatattctaaaatggtaaacttttgcatatcggacgcagaaattggtataaatgttgtaattgtattatttcccgtcaatggactagtcacagctccatcagttttatatcctttagagtatttctcactcgtgtctagcattctagagcattccatgatctgtttatcgttgatattggccggaaagatagattttttattttttattatattactattggcaattgtagatataacttctggtaaatatttttctaccttttcaatttcttctattttcaagccggctatatattctgctatattgttgctagtatcaataccttttctggctaagaagtcatatgtggtattcactatatcagttttaactggtagttccattagcctttccacttctgcagaataatcagaaattggttctttaccagaaaatccagctactataataggctcaccgatgatcattggcaaaatcctatattgtaccagattaatgagagcatatttcatttccaataattctgctagttcttgagacattgatttatttgatgaatctagttggttctctagatactctaccatttctgccgcatacaataacttgttagataaaatcagggttatcaaagtgtttagcgtggctagaatagtgggcttgcatgtattaaagaatgcggtagtatgagtaaaccgttttaacgaattatatagtctccagaaatctgtggcgttacatacatgagccgaatgacatcgaagattgtccaatatttttaatagctgctctttgtccattatttctatatttgactcgcaacaattgtagataccattaatcactgattcctttttcgatgccggacaatagcacaattgtttagctttggactctatgtattcagaattaatagatatatctcttaatacagattgcactatacattttgaaactatgtcaaaaattgtagaacgacgctgttctgcagccatttaactttaaataatttacaaaaatttaaaatgagcatccgtataaaaatcgataaactgcgccaaattgtggcatatttttcagagttcagtgaagaagtgtctataaatgtagactcgacggatgagttaatgtatatttttgccgccttgggcggatctgtaaacatttgggccattatacctctcagtgcatcagtgttctaccgaggagccgaaaacattgtgtttaatcttcctgtgtccaaggtaaaatcgtgtttgtgtagttttcacaatgatgccatcatagatatagaacctgatctggaaaataatctagtaaaactttctagttatcatgtagtaagtgtcgattgtaataaggaactgatgcctattaggacagatactactatttgtctaagtatagatcaaaagaaatcttatgtgtttaattttcacaagtatgaagaaaaatgttgtggtagaaccgtcattcatttagaatggttgttgggctttatcaagtgtattagtcagcatcagcatctggctattatgtttaaagatgacaatattattatgaagactcctggtaatactgatgcattttccagggaatattctatgactgaatgttctcaagaactacaaaagttttctttcaaaatagctatctcgtctctcaacaaactacgaggattcaaaaagagagtcaatgtttttgaaactagaatcgtaatggataatgacgataacattctaggaatgttgttttcggatagagttcaatcctttaagatcaacatctttatggcgtttttagattaatactttcaatgagataaatatgggtggcggagtaagtgttgagctccctaaacgggatccgcctccgggagtacccactgatgagatgttattaaacgtggataaaatgcatgacgtgatagctcccgctaagcttttagaatatgtgcatataggaccactagcaaaagataaagaggataaagtaaagaaaagatatccagagtttagattagtcaacacaggacccggtggtctttcggcattgttaagacaatcgtataatggaaccgcacccaattgctgtcgcacttttaatcgtactcattattggaaaaaggatggaaagatatcagataagtatgaagagggtgcagtattagaatcgtgttggccagacgttcacgacactggaaaatgcgatgttgatttattcgactggtgtcagggggatacgttcgatagaaacatatgccatcagtggatcggttcagcctttaataggagtaatagaactgtagagggtcaacaatcgttaataaatctgtataataagatgcaaacattatgtagtaaagatgctagtgtaccaatatgtgaatcatttttgcatcatttacgcgcacacaatacagaagatagcaaagagatgatcgattatattctaagacaacagtctgcggactttaaacagaaatatatgagatgtagttatcccactagagataagttagaagagtcattaaaatatgcggaacctcgagaatgttgggatccagagtgttcgaatgccaatgttaatttcttgctaacacgtaattataataatttaggactttgcaatattgtacgatgtaatactagcgtgaacaacttacagatggataaaacttcctcattaagattgtcatgtggattaagcaatagtgatagattttctactgttcccgtcaatagagcaaaagtagttcaacataatattaaacactcgttcgacctaaaattgcatttgatcagtttattatctctcttggtaatatggatactaattgtagctatttaaatgggtgccgcagcaagcatacagacgacggtgaatacactcagcgaacgtatctcgtctaaattagaacaagaagcgaatgctagtgctcaaacaaaatgtgatatagaaatcggaaatttttatatccgacaaaaccatggatgtaacctcactgttaaaaatatgtgctctgcggacgcggatgctcagttggatgctgtgttatcagccgctacagaaacatatagtggattaacaccggaacaaaaagcatacgtgccagctatgtttactgctgcgttaaacattcagacgagtgtaaacactgttgttagagattttgaaaattatgtaaaacaaacttgtaattctagcgcggtcgtcgataacaaattaaagatacaaaacgtaatcatagatgaatgttacggagccccaggatctccaacaaatttggaatttattaatacaggatctagcaaaggaaattgtgccattaaggcgttgatgcaattgactactaaggccactactcaaatagcacctagacaagttgctggtacaggagttcagttttatatgattgttatcggtgttataatattggcagcgttgtttatgtactatgccaagcgtatgctgttcacatccaccaatgataaaatcaaacttattttagccaataaggaaaacgtccattggactacttacatggacacattctttagaacttctccgatggttattgctaccacggatatgcaaaactgaaaatatattgataatattttaatagattaacatggaagttatcgctgatcgtctagacgatatagtgaaacaaaatatagcggatgaaaaatttgtagattttgttatacacggtctagagcatcaatgtcctgctatacttcgaccattaattaggttgtttattgatatactattatttgttatagtaatttatatttttacggtacgtctagtaagtagaaattatcaaatgttgttggcgttggtggcgctagtcatcacattaactattttttattactttatactataatagtactagactgacttctaacaaacatctcacctgccataaataaatgcttgatattaaagtcttctatttctaacactattccatctgtggaaaataatactctgacattatcgctaattgacacatcggtgagtgatatgcctataaagtaataatcttctttgggcacatataccagtgtaccaggttctaacaacctatttactggtgctcctgtagcatactttttctttaccttgagaatatccatcgtttgcttggtcaatagcgatatgtgattttttatcaaccactcgaaaaagtaattggagtgttcatatcctctacgggctattgtctcatggccgtgtatgaaatttaagtaacacgactgtggtagatttgttctatagagccggttgccgcaaatagatagaactaccaatatgtctgtacaaatgttaaacattaattgattaacagaaaaaacaatgttcgttctgggaatagaaaccagatcaaaacaaaattcgttagaatatatgccacgtttatacattgaatataaaataactacagtttgaaaaataacagtatcatttaaacatttaacttgcggggttaatttcacaactttactgtttttaagctgttcaaaatatagcatcgatccatgagaaatacgtttagccgcctttaatagaggaaatcccaccgcctttctggatctcaccaacgacgatagttctgaccagcaactcatttcttcatcatccacctgttttaacatataataggcaggagatagatatccgtcattgcaatattccttttcgtaggcacacaatctaatattgataaaatctccattctcttctctgcatttattatcttgtttcggtggctgattaggctgtagtcttggtttaggccttggtctatcgttgttgaatctattttggtcattaaatctttcatttcttcctggtatatttctatcacctcgtttggttggatttttgtctatattatcgtttgtaacatcggtacgggtattcatttatcacaaaaaaaacttctctaaatgagtctactgctagaaaacctcatcgaagaagataccatattttttgcaggaagtatatctgagtatgatgatttacaaatggttattgccggcgcaaaatccaaatttccaagatctatgctttctatttttaatatagtacctagaacgatgtcaaaatatgagttggagttgattcataacgaaaatatcacaggagcaatgtttaccacaatgtataatataagaaacaatttgggtctaggagatgataaactaactattgaagccattgaaaactatttcttggatcctaacaatgaagttatgcctcttattattaataatacggatatgactgccgtcattcctaaaaaaagtggtaggagaaagaataagaacatggttatcttccgtcaaggatcatcacctatcttgtgcattttcgaaactcgtaaaaagattaatatttataaagaaaatatggaatccgcatcgactgagtatacacctatcggagacaacaaggctttgatatctaaatatgcgggaattaatgtcctgaatgtgtattctccttccacatccatgagattgaatgccatttacggattcaccaataaaaataaactagagaaacttagtactaataaggaactagaatcgtatagttctagccctcttcaagaacccattaggttaaatgattttctgggactattggaatgtgttaaaaagaatattcctctaacagatattccgacaaaggattgattactataaatggagaatgttcctaatgtatactttaatcctgtgtttatagagcccacgtttaaacattctttattaagtgtttataaacacagattaatagttttatttgaagtattcgttgtattcattctaatatatgtattttttagatctgaattaaatatgttcttcatgcctaaacgaaaaatacccgatcctattgatagattacgacgtgctaatctagcgtgtgaagacgataaattaatgatctatggattaccatggatgacaactcaaacatctgcgttatcaataaatagtaaaccgatagtgtataaagattgtgcaaagcttttgcgatcaataaatggatcacaaccagtatctcttaacgatgttcttcgcagatgatgattcattttttaagtatttggctagtcaagatgatgaatcttcattatctgatatattgcaaatcactcaatatctagactttctgttattattattgatccaatcaaaaaataaattagaagccgtgggtcattgttatgaatctctttcagaggaatacagacaattgacaaaattcacagactctcaagattttaaaaaactgtttaacaaggtccctattgttacagatggaagggtcaaacttaataaaggatatttgttcgactttgtgattagtttgatgcgattcaaaaaagaatcctctctagctaccaccgcaatagatcctattagatacatagatcctcgtcgcgatatcgcattttctaacgtgatggatatattaaagtcgaataaagtgaacaataattaattctttattgtcatcatgaacggcggacatattcagttgataatcggccccatgttttcaggtaaaagtacagaattaattagacgagttagacgttatcaaatagctcaatataaatgcgtgactataaaatattctaacgataatagatacggaacgggactatggacgcatgataagaataattttgaagcattggaagcaactaaactatgtgatgtcttggaatcaattacagatttctccgtgataggtatcgatgaaggacagttctttccagacattgttgaattctgtgagcgtatggcaaacgaaggaaaaatagttatagtagccgcactcgatgggacatttcaacgtaaaccgtttaataatattttgaatcttattccattatctgaaatggtggtaaaactaactgctgtgtgtatgaaatgctttaaggaggcttccttttctaaacgattgggtgaggaaaccgagatagaaataataggaggtaatgatatgtatcaatcggtgtgtagaaagtgttacatcgactcataatattatattttttatctaaaaaactaaaaataaacattgattaaattttaatataatacttaaaaatggatgttgtgtcgttagataaaccgtttatgtattttgaggaaattgataatgagttagattacgaaccagaaagtgcaaatgaggtcgcaaaaaaactgccgtatcaaggacagttaaaactattactaggagaattattttttcttagtaagttacagcgacacggtatattagatggtgccaccgtagtgtatataggatcggctcctggtacacatatacgttatttgagagatcatttctataatttaggaatgattatcaaatggatgctaattgacggacgccatcatgatcctattctaaatggattgcgtgatgtgactctagtgactcggttcgttgatgaggaatatctacgatccatcaaaaaacaactgcatccttctaagattattttaatttctgatgtaagatccaaacgaggaggaaatgaacctagtacggcggatttactaagtaattacgctctacaaaatgtcatgattagtattttaaaccccgtggcatctagtcttaaatggagatgcccgtttccagatcaatggatcaaggacttttatatcccacacggtaataaaatgttacaaccttttgctccttcatattcagctgaaatgagattattaagtatttataccggtgagaacatgagactgactcgagttaccaaatcagacgttgtaaattatgaaaaaaagatgtactaccttaataagatcgtccgtaacaaagtagttgttaactttgattatcctaatcaggaatatgactattttcacatgtactttatgctgaggaccgtgtactgcaataaaacatttcctactactaaagcaaaggtactatttctacaacaatctatatttcgtttcttaaatattccaacaacatcaactgaaaaagttagtcatgaaccaatacaacgtaaaatatctagcaaaaattctatgtctaaaaacagaaatagcaagagatccgtacgcggtaataaatagaaacgtactactgagatatactaccgatatagagtataatgatttagttactttaataaccgttagacataaaattgattctatgaaaactgtgtttcaggtatttaacgaatcatccataaattatactccggttgatgatgattatggagaaccaatcattataacatcgtatcttcaaaaaggtcataacaagtttcctgtaaattttctatacatagatgtggtaatatctgacttatttcctagctttgttagactagatactacagaaactaatatagttaatagtgtactacaaacaggcgatggtaaaaagactcttcgtcttcccaaaatgttagagacggaaatagttgtcaagattctctatcgccctaatataccattaaaaattgttagatttttccgcaataacatggtaactggagtagagatagccgatagatctgttatttcagtcgctgattaatcaattagtagagatgagataagaacattataataatcaataatatatcttatatcttatatcttatatcttgtttagaaaaatgctaatattaaaatagctaacgctagtaatccaatcggaagccatttgatatctataatagggtatctaatttcctgatttaaatagcggacagctatattctcggtagctactcgtttggaatcacaaacattatttacatctaatttactatctgtaatggaaacgtttcccaatgaaatggtacaatccgatacattgcattttgttatatttttttttaaagaggctggtaacaacgcatcgcttcgtttacatggctcgtaccaacaataatagggtaatcttgtatctattcctatccgtactatgcttttatcaggataaatacatttacatcgtatatcgtctttgttagcatcacagaatgcataaatttgttcgtccgtcatgataaaaatttaaagtgtaaatataactattatttttatagttgtaataaaaagggaaatttgattgtatactttcggttctttaaaagaaactgacttgataaaaatggctgtaatctctaaggttacgtatagtctatatgatcaaaaagagattaatgctacagatattatcattagtcatgttaaaaatgacgacgatatcggtaccgttaaagatggtagactaggtgctatggatggggcattatgtaagacttgtgggaaaacggaattggaatgtttcggtcactggggtaaagtaagtatttataaaactcatatagttaagcctgaatttatttcagaaattattcgtttactgaatcatatatgtattcactgcggattattgcgttcacgagaaccgtattccgacgatattaacctaaaagagttatcgggacacgctcttaggagattaaaggataaaatattatccaagaaaaagtcatgttggaacagcgaatgtatgcaaccgtatcaaaaaattactttttcaaagaaaaaggtttgtttcgtcaacaagttggatgatattaacgttcctaattctctcatctatcaaaagttaatttctattcatgaaaagttttggccattattagaaattcatcaatatccagctaacttattttatacagactactttcccatccctccgctgattattagaccggctattagtttttggatagatagtatacccaaagagaccaatgaattaacttacttattaggtatgatcgttaagaattgtaacttgaatgctgatgaacaggttatccagaaggcggtaatagaatacgatgatattaaaattatttctaataacacttccagtatcaatttatcatatattacatccggcaaaaataatatgattagaagttatattgtcgcccgacgaaaagatcagaccgctagatctgtaattggtcccagtacatctatcaccgttaatgaggtaggaatgcccgcatatattagaaatacacttacagaaaagatatttgttaatgcctttacagtggataaagttaaacaactattagcgtcaaaccaagttaaattttactttaataaacgattaaaccaattaacaagaatacgccaaggaaagtttattaaaaataaaatacatttattgcctggtgattgggtagaagtagctgttcaagaatatacaagtattatttttggaagacagccgtctctacatagatacaacgtcatcgcttcatctatcagagctaccgaaggagatactatcaaaatatctcccggaattgccaactctcaaaatgctgatttcgacggagatgaagaatggatgatattggagcaaaatcctaaagccgtaattgaacaaagtattcttatgtatccgacgacgttactcaaacacgatattcatggagcccccgtttatggatctattcaagatgaaatcgtagcagcgtattcattgtttagaatacaagatctttgtttagatgaagtattgaacatcttggggaaatatggaagaaagttcgatcctaaaggtaaatgtaaattcagcggtaaagatatctatacttacttgataggtgaaaagattaattatccgggtctcttaaaggatggtgaaattattgcaaacgacgtagatagtaattttgttgtggctatgaggcatctgtcattggctggactcttatccgatcataagtcgaacgtggaaggtatcaactttattatcaagtcatcttatgtttttaagagatatctatctatttacggttttggggtgacattcaaagatctgagaccaaattcgacgttcactaataaattggaggccatcaacgtagaaaaaatagaacttatcaaagaagcatacgccaaatatctcaacgatgtaagagacgggaaaatagttccattatctaaagctttagaggcggactatgtggaatccatgttatccaacttgacaaatcttaatatccgagagatagaagaacatatgagacaaacgctgatagatgatccagataataacctcctgaaaatggccaaagcgggttataaagtaaatcccacagaactaatgtatattctaggtacttatggacaacagaggattgatggtgaaccagcagagactcgagtattgggtagagtcttaccttactatcttccagactctaaggatccagaaggaagaggttatattcttaattctttaacaaaaggattaacaggttctcaatattacttttcgatgctggttgccagatctcaatctactgatatcgtctgtgaaacatcacgtaccggaacactggctagaaaaatcattaaaaagatggaggatatggtggtcgacggatacggacaagtagttataggtaatacgctcatcaagtacgccgccaattataccaaaattctaggctcagtatgtaaacctgtagatcttatctatccagatgagtccatgacttggtatttggaaattagtgctctgtggaataaaataaaacagggattcgtttactctcagaaacagaaacttgcaaaaaagacattggcgccgtttaatttcctagtattcgtcaaacccaccactgaggataatgctattaaggttaaggatctgtacgatatgattcataacgtcattgatgatgtgagagagaaatacttctttacggtatctaatatagattttatggagtatatattcttgacgcatcttaatccttctagaattagaattacaaaagaaacggctatcactatctttgaaaagttctatgaaaaactcaattatactctaggtggtggaactcctattggaattatttctgcacaggtattgtctgagaagtttacacaacaagccctgtccagttttcacactactgaaaaaagtggtgccgtcaaacaaaaacttggtttcaacgagtttaataacctgactaatttgagtaagaataagaccgaaattatcactctggtatccgatgatatctctaaacttcaatctgttaagattaatttcgaatttgtatgtttgggagaattaaatccaaacatcactcttcgaaaagaaacagataggtatgtagtagatataatagtcaatagattatacatcaagagagcagaaattaccgaattagtcgtcgaatatatgattgaacgatttatctcctttagcgtcattgtaaaggaatggggtatggagacattcattgaggacgaggataatattagatttactgtctacctaaatttcgttgaaccggaagaattgaatcttagtaagtttatgatggttcttccgggtgccgccaacaagggcaagattagtaaattcaagattcctatctctgactatacgggatatgacgacttcaatcaaacaaaaaagctcaataagatgactgtagaactcatgaatctaaaagaattgggttctttcgatttggaaaacgtcaacgtgtatcctggagtatggaatacatacgatatcttcggtatcgaggccgctcgtgaatacttgtgcgaagccatgttaaacacctatggagaagggttcgattatctgtatcagccttgtgatcttctcgctagtttactatgtgctagttacgaaccagaatcagtgaataaattcaagttcggcgcagctagtactcttaagagagctacgttcggagacaataaagcattgttaaacgcggctcttcataaaaagtcagaacctattaacgataatagtagctgccacttttttagcaaggtccctaatataggaactggatattacaaatactttatcgacttgggtcttctcatgagaatggaaaggaaactatctgataagatatcttctcaaaagatcaaggaaatggaagaaacagaagacttttaattcttatcaataacatatttttctatgatctgtcttttaaacgatggattttccacaaatgcgcctctcaagtccctcatagaatgatacacgtataaaaaatatagcataggcgatgactccttatttttagacattagatatgccaaaatcatagccccgcttctatttactcccgcagcacaatgaaccaacacgggctcgtttcgttgatcacatttagataaaaaggcggtcacgtcgtcaaaatatttactaatatcggtagttgtatcatctaccaacggtatatgaataatattaatattagagttaggcaatgtatatttatccatcgtcaaatttaaaacatatttgaacttaacttcagatgatggtgcatccatagcatttttataatttcccaaatacacattattggttacccttgtcattatagtgggagatttggctttgtgcatatctccagttgaacgtagtagtaagtatttatacaaacttttcttatccatttataacgtacaaatggataaaactactttatcggtaaacgcgtgtaatttagaatacgttagagaaaaggctatagtaggcgtacaagcagccaaaacatcaacacttatattctttgttattatattggcaattagtgcgctattactctggtttcagacgtctgataatccagtctttaatgaattaacgagatatatgcgaattaaaaatacggttaacgattggaaatcattaacggatagcaaaacaaaattagaaagtgatagaggtaaacttctagccgctggtaaggatgatatattcgaattcaaatgtgtggatttcggcgcctattttatagctatgcgattggataagaaaacatatctgccgcaagctattaggcgaggtactggagacgcgtggatggttaaaaaggcggcaaaggtcgatccatctgctcaacaattttgtcagtatttgataaaacacaagtctaataatgttattacttgtggtaatgagatgttaaatgaattaggttatagcggttattttatgtcaccgcattggtgttccgattttagtaatatggaatagtgttagataaatgcggtaacaaatgttcctgtaaggaaccataacagcttagatttaacgttaaagatgagcataaacataataaacaaaattacaatcaaacctataacattaatatcaaacaatccaaaaaatgaaatcagtggagtagtaaacgcgtacataactcctggataacgtttagcagctgccgttcctattctagaccaaaaattcggtttcatgttttcgaagcggtgttctgcaacaagtcggggatcgtgttctacatatttggcggcattatccagtatctgcctattgatcttcatttcgttttcgattctggctatttcaaaataaaatcccgatgatagacctccagactttataatttcatctacgatgttcagcgccgtagtaactctaataatataggctgataagctaacatcataccctcctgtatatgtgaatatggtatgatttttgtccattacaagctcggttttaactttattgcctgtaataatttctctcatctgtaggatatctatttttttgtcatgcattgccttcaagacgggacgaagaaacgtaatatcctcaataacgttatcgttttctacaataactacatattctacctttttattttctaactcggtaaaaaaattagaatcccatagggctaaatgtctagcgatatttcttttcgtttcctctgtacacatagtgttacaaaaccctgaaaagaagtgagtatacttgtcatcatttctaatgtttcctccagtccactgtataaacgcataatccttgtaatgatctggatcatccttgactaccacaacatttcttttttctggcataacttcgttgtcctttacatcatcgaacttctgatcattaatatgctcatgaacattaggaaatgtttctgatggaggtctatcaataactggcacaacaataacaggagttttcaccgccgccatttagttattgaaattaatcatatacaactctttaatacgagttatattttcgtctatccattgtttcacatttacatatttcgacaaaaagatataaaatgcgtattccaatgcttctctgtttaatgaattactaaaatatacaaacacgtcactgtctggcaataaatgatatcttagaatattgtaacaatttattttgtattgcacatgttcgtgatctatgagttcttcttcgaatggcataggatctccgaatctgaaaacgtataaataggagttagaataataatatttgagagtattggtaatatataaactctttagcggtataattagtttttttctctcaatttctatttttagatgtgatggaaaaatgactaattttgtagcattagtatcatgaactctaatcaaaatcttaatatcttcgtcacacgttagctctttgaagtttttaagagatgcatcagttggttctacagatggagtaggtgcaacaattttttgttctacacatgtatgtactggagccattgttttaactataatggtgcttgtatcgaaaaactttaatgcagatagcggaagctcttcgccgcgactttctacatcgtaattgggttctaacgccgatctctgaatggatactagttttctaagttctaatgtgattctctgaaaatgtaaatccaattcctccggcattatagatgtgtatacatcggtaaataaaactatagtatccaacgatcccttctcgcaaattctagtcttaaccaaaaaatcgtatataaccacggagatggcgtatttaagagtggattcttctaccgttttgttcttggatgtcatataggaaactataaagtccgcactactgttaagaatgattactaacgcaactatatagttcaaattaagcattttggaaacataaaataactctgtagacgatacttgactttcgaataagtttgcagacaaacgaagaaagaacagacctctcttaatttcagaagaaaactttttttcgtattcctgacgtctagagtttatatcaataagaaagttaagaattagtcggttaatgttgtatttcattacccaagtttgagatttcataatattatcaaaagacatgataatattaaagataaagcgctgactatgaacgaaatagctatatggttcgctcaaaaatatagtcttgttaaacgtggaaacgataactgtatttttaatcacgtcagcggcatctaaattaaatataggtatatttattccacacactctacaatatgccacaccatcttcataataaataaattcgttagcaaaattattaattttagtgaaatagttagcgtcaactttcatagcttccttcaatctaatttgatgctcacacggtgcgaattctactctaacatcccttttccatgcctcaggttcatcgatctctataatatctagttttttgcgtttcacaaacacaggctcgtctctcgcgatgagatctgtatagtaactatgtaaatgataactagatagaaagatgtagctatatagatgacgatcctttaagagaggtataataactttaccccaatcagatagactgttgttatggtcttcggaaaaagaatttttataaatttttccagtattttccaaatatacgtacttaacatctaaaaaatccttaatgataataggaatggataatccgtctattttataaagaaatacatatcgcacattatacttttttttggaaatgggaataccgatgtgtctacataaatatgcaaagtctaaatattttttagagaatcttagttggtccaaattcttttccaagtacggtaatagatttttcatattgaacggtatcttcttaatctctggttctagttccgcattaaatgatgaaactaagtcactatttttataactaacgattacatcacctctaacatcatcatttaccagaatactgatcttcttttgtcgtaaatacatgtctaatgtgttaaaaaaaagatcatacaagttatacgtcatttcatctgtggtattcttgtcattgaaggataaactcgtactaatctcttctttaacagcctgttcaaatttatatcctatatacgaaaaaatagcaaccagtgtttgatcatccgcgtcaatattctgttctatcgtagtgtataacaatcgtatatcttcttctgtgatagtcgatacgttataaaggttgataacgaaaatatttttatttcgtgaaataaagtcatcgtaggattttggacttatattcgcgtctagtagatatgcttttatttttggaatgatctcaattagaatagtctctttagagtccatttaaagttacaaacaactaggaaattggtttatgatgtataatttttttagtttttatagattctttattctatacttaaaaaatgaaaataaatacaaaggttcttgagggttgtgttaaattgaaagcgagaaataatcataaattatttcattatcgcgatatccgttaagtttgtatcgtaatggcgtggtcaattacaaataaagcggatactagtagcttcacaaagatggctgaaatcagagctcatctaaaaaatagcgctgaaaataaagataaaaacgaggatattttcccggaagatgtaataattccatctactaagcccaaaaccaaacgagccactactcctcgtaaaccagcggctactaaaagatcaaccaaaaaggaggaagtggaagaagaagtagttatagaggaatatcatcaaacaactgaaaaaaattctccatctcctggagtcggcgacattgtagaaagcgtggctgctgtagagctcgatgatagcgacggggatgatgaacctatggtacaagttgaagctggtaaagtaaatcatagtgctagaagcgatctttctgacctaaaggtggctaccgacaatatcgttaaagatcttaagaaaattattactagaatctctgcagtatcgacggttctagaggatgttcaagcagctggtatctctagacaatttacttctatgactaaagctattacaacactatctgatctagtcaccgagggaaaatctaaagttgttcgtaaaaaagttaaaacttgtaagaagtaaatgcgtgcacttttttataaagatggtaaactctttaccgataataattttttaaatcctgtatcagacgataatccagcgtatgaggttttgcaacatgttaaaattcctactcatttaacagatgtagtagtatatgaacaaacgtgggaagaggcattaactagattaatttttgtgggaagcgattcaaaaggacgtagacaatacttttacggaaaaatgcatgtacagaatcgcaacgctaaaagagatcgtatttttgttagagtatataacgttatgaaacgaattaattgttttataaacaaaaatataaagaaatcgtccacagattccaattatcagttggcggtttttatgttaatggaaactatgttttttattagatttggtaaaatgaaatatcttaaggagaatgaaacagtagggttattaacactaaaaaataaacacatagaaataagtcccgatgaaatagttatcaagtttgtaggaaaggacaaagtttcacatgaatttgttgttcataagtctaatagactatataaaccgctattgaaactgacggatgattctagtcccgaagaatttctgttcaacaaactaagtgaacgaaaggtatacgaatgtatcaaacagtttggtattagaatcaaggatctccgaacgtatggagtcaattatacgtttttatataatttttggacaaatgtaaagtccatatctcctcttccgtcaccaaaaaagttaatagcgttaactatcaaacaaactgctgaagtggtaggtcatactccatcaatttcaaaaagagcttacatggcaacgactattttagaaatggtaaaggataaaaattttttagatgtagtatctaaaactacgttcgatgaattcctatctatagtcgtagatcacgttaaatcatctacggatggatgatatagatctttacacaaataattacaagaccgataaatggaaatggataagcgtataaaatctctcgcaatgacagctttcttcggagagctaaacacattagatattatggcattgataatgtctatatttaaacgccatccaaacaataccattttttcagtggataaggatggtcagtttatgattgatttcgaatacgataattataaggcttctcaatatttggatctgaccctcactccgatatctggagatgaatgcaagactcacgcatcgagtatagccgaacaattggcgtgtgcggatattattaaagaggatattagcgaatatatcaaaactactccccgtcttaaacgatttataaaaaaataccgcaatagatcagatactcgcatcagtcgagatacagaaaagcttaaaatagctctagctaaaggcatagattacgaatatataaaagacgcttgttaataagtaaatgaaaaaaaactagtcgtttataataaaacacgatatggatgccaacgtagtatcatcttctactattgcaacgtatatagacgctttagcgaagaatgcttcagaattagaacagaggtctaccgcatacgaaataaataatgaattggaactagtatttattaagccgccattaattactttgacaaatgtagtgaatatctctacgattcaggaatcgtttattcgatttaccgttactaataaggaaggtgttaaaattagaactaagattccattatctaaggtacatggtctagatgtaaaaaatgtacagttagtagatgctatagataacatagtttgggaaaagaaatcattagtgacggaaaatcgtcttcacaaagaatgcttgttgagactatcgacagaggaacgtcatatatttttggattacaagaaatatggatcctctatccgactagaattagtcaatcttattcaagcaaaaacaaaaaactttacgatagactttaagctaaaatattttctaggatccggtgcccagtctaaaagttctttattacacgctattaatcatccaaagtcaaggcctaatacatctctggaaatagaattcacacctagagacaatgaaaaagttccatatgatgaactaataaaggaattgacgactctatcacgtcatatatttatggcttctccagagaatgtaattctttctccgcctattaacgcacctataaagacttttatgttgcctaaacaagatatagtaggtctggatctggaaaatctatacgctgtaactaagactgacggcattcctataactatcagagttacatcaaacgggttgtattgttattttacacatcttggttatattattagatatcctgttaagagaataatagattccgaagtagtagtctttggtgaggcagttaaggataagaactggaccgtatatctcattaagctaatagagcctgtgaatgcaatcaatgatagactagaagaaagtaagtatgttgaatctaaactagtggatatttgtgatcggatagtattcaagtcaaagaaatacgaaggtccgtttactacaactagtgaagtcgtcgatatgttatctacatatttaccaaagcaaccagaaggtgttattctgttctattcaaagggacctaaatctaacattgattttaaaattaaaaaggaaaatactatagaccaaactgcaaatgtagtatttaggtacatgtccagtgaaccaattatctttggagaatcgtctatctttgtagagtataagaaatttagcaacgataaaggctttcctaaagaatatggttctggtaagattgtgttatataacggcgttaattatctaaataatatctattgtttggaatatattaatacacataatgaagtgggtattaagtccgtggttgtacctattaagtttatagcagaattcttagttaatggagaaatacttaaacctagaatcgataaaaccatgaaatatattaactcagaagattattatggaaatcaacataatatcatagtcgaacatttaagagatcaaagcatcaaaataggagatatctttaacgaggataaactatcggatgtgggacatcaatacgccaataatgataaatttagattaaatccagaagttagttattttacgaataaacgaactagaggaccgttgggaattttatcaaactacgtcaagactcttcttatttctatgtattgttccaaaacatttttagacgattccaacaaacgaaaggtattggcgattgattttggaaacggtgctgacctggaaaaatacttttatggagagattgcgttattggtagcgacggatccggatgctgatgctatagctagaggaaatgaaagatacaacaaattaaactctggaattaaaaccaagtactacaaatttgactacattcaggaaactattcgatccgatacatttgtctctagtgtcagagaagtattctattttggaaagtttaatatcatcgactggcagtttgctatccattattcttttcatccgagacattatgctaccgtcatgaataacttatccgaactaactgcttctggaggcaaggtattaatcactaccatggacggagacaaattatcaaaattaacagataaaaagacttttataattcataagaatttacctagtagcgaaaactatatgtctgtagaaaaaatagctgatgatagaatagtggtatataatccatcaacaatgtctactccaatgactgaatacattatcaaaaagaacgatatagtcagagtgtttaacgaatacggatttgttcttgtagataacgttgatttcgctacaattatagaacgaagtaaaaagtttattaatggcgcatctacaatggaagatagaccgtctacaaaaaactttttcgaactaaatagaggagccattaaatgtgaaggtttagatgtcgaagacttacttagttactatgttgtttatgtcttttctaagcggtaaataataatatggtatgggttctgatatccccgttctaaatgcattaaataattccaatagagcgatttttgttcctataggaccttccaactgtggatactctgtattgttaatagatatattaatacttttgtcgggtaacagaggttctacgtcttctaaaaataaaagtttgataacatctggcctgttcataaataaaaacttggcgattctatatatactcttattatcaaatctagccattgtcttatagatgtgagctactgtaggtgtaccatttgattttctttctaatactatatatttctctcgaagaagttcttgcacatcatctgggaataaaatactactgttgagtaaatcagttattttttttatatcgatattgatggacatttttatagttaaggataataagtatcccaaagtcgataacgacgataacgaagtatttatacttttaggaaatcacaatgactttatcagattaaaattaacaaaattaaaggagcatgtatttttttctgaatatattgtgactccagatacatatggatctttatgcgtcgaattaaatgggtctagttttcagcacggtggtagatatatagaggtggaggaatttatagatgctggaagacaagttagatggtgttctacatccaatcatatatctgaagatatacccgaagatatacacactgataaatttgtcatttatgatatatacacttttgacgctttcaagaataaacgattggtattcgtacaggtacctccgtcgttaggagatgatagtcatttgactaatccgttattgtctccgtattatcgtaattcagtagccagacaaatggtcaatgatatgatttttaatcaagattcatttttaaaatatttattagaacatctgattagaagccactatagagtttctaaacatataacaatagttagatacaaggataccgaagaattaaatctaacgagaatatgttataatagagataagtttaaggcgtttgtattcgcttggtttaacggcgtttcggaaaatgaaaaggtactagatacgtataaaaaggtatctaatttgatataatgaattcagtgactgtatcacacgcgccatatactattacttatcacgatgattgggaaccagttatgagtcaattggtagagttttataacgaagtagccagttggctgctacgagacgagacgtcgcctattcctgataagttctttatacagttgaaacaaccgcttagaaataaacgagtatgtgtgtgtggtatagatccgtatccgaaagatggaactggtgtaccgttcgaatcaccaaattttacaaaaaaatcaattaaggagatagcttcatctatatctagattaaccggagtaattgattataaaggttataaccttaatataatagacggggttataccctggaattattacttaagttgtaaattaggagaaacaaaaagtcacgcgatctactgggataagatttccaagttactgctgcagcatataactaaacacgttagtgttctttattgtttgggtaaaacagatttctcgaatatacgggcaaagttagaatccccggtaactaccatagtgggatatcatccagcggctagagaccgccaattcgagaaagatagatcatttgaaattatcaacgttttactggaattagacaacaaggtacctataaattgggctcaagggtttatttattaatgctttagtgaaattttaacttgtgttctaaatggatgcggctattagaggtaatgatgttatctttgtccttaagactataggtgtcccatcagcatgtagacaaaatgaagatccaagattcgtagaagcatttaaatgcgacgagttaaaaagatatattgataataatccagaatgtacactattcgaaagtcttagggatgaggaagcatactctatagtcagaattttcatggatgtagatttagacgcgtgtctagacgaaatagattatttaacggctattcaagattttattatcgaggtgtcaaactgtgtagctagattcgcgtttacagaatgcggtgccattcatgaaaatgtaataaaatccatgagatctaatttttcattgactaagtctacaaatagagataaaacaagttttcatattatctttttagacacgtataccactatggatacattgatagctatgaaacgaacactattagaattaagtagatcatctgaaaatccactaacaagatcgatagacactgccgtatataggagaaaaacaactcttcgggttgtaggtactaggaaaaatccaaattgcgacactattcatgtaatgcaaccaccgcatgataatatagaagattacctattcacttacgtggatatgaacaacaatagttattacttttctctacaacgacgattggaggatttagttcctgataagttatgggaaccagggtttatttcattcgaagacgctataaaaagagtttcaaaaatattcattaattctataataaactttaatgatctcgatgaaaataattttacaacggtaccactggtcatagattacgtaacaccttgtgcattatgtaaaaaacgatcgcataaacatccgcatcaactatcgttggaaaatggtgctattagaatttacaaaactggtaatccacatagttgtaaagttaaaattgttccgttggatggtaataaactgtttaatattgcacaaagaattttagacactaactctgttttattaaccgaacgaggagactatatagtttggattaataattcatggaaatttaacagcgaagaacccttgataacaaaactaattctgtcaataagacatcaactacctaaggaatattcaagcgaattactctgtccgaggaaacgaaagactgtagaagctaacatacgagacatgttagtagattcagtagagaccgatacctatccggataaacttccgtttaaaaatggtgtattggacctggtagacggaatgttttactctggagatgatgctaaaaaatatacgtgtactgtatcaaccggatttaaatttgacgatacaaagttcgtcgaagacagtccagaaatggaagagttaatgaatatcattaacgatatccaaccattaacggatgaaaataagaaaaatagagagctatatgaaaaaacattatctagttgtttatgtggtgctaccaaaggatgtttaacattcttttttggagaaactgcaactggaaagtcgacaaccaaacgtttgttaaagtctgctatcggtgacctgtttgttgagacgggtcaaacaattttaacagatgtattggataaaggacctaatccatttatcgctaacatgcatttgaaaagatctgtattctgtagcgaactacctgattttgcctgtagtggatcaaagaaaattagatctgataatattaaaaagttgacagaaccttgtgtcattggaagaccgtgtttctccaataaaattaataatagaaaccatgctacaatcattatcgatactaattacaaacctgtctttgataggatagataacgcattaatgagaagaattgccgtcgtgcgattcagaacacacttttctcaaccttctggtagagaggctgctgaaaataatgacgcgtacgataaagtcaaactattagacgaggggttagatggtaaaatacaaaataatagatatagatttgcatttctatacttgttggtgaaatggtacaaaaaatatcatgttcctattatgaaactatatcctacacccgaagagattcctgactttgcattctatctcaaaataggtactctgttagtatctagctctgtaaagcatattccattaatgacggacctctccaaaaagggatatatattgtacgataatgtggttactcttccgttgactactttccaacagaaaatatccaagtattttaattctagactatttggacacgatatagagagcttcatcaatagacataagaaatttgccaatgttagtgatgaatatctgcaatatatattcatagaggatatttcatctccgtaaatatatgctcatatatttatagaagatatcacatatctaaatgaataccggaattatagatttatttgataatcatgttgatagtataccaactatattacctcatcagttagctactctagattatctagttagaactatcatagatgagaacagaagcgtgttattgttccatattatgggatcaggtaaaacaataatcgctttgttgttcgccttggtagcttccagatttaaaaaggtttacattctagtgccgaacatcaacatcttaaaaattttcaattataatatgggtgtagctatgaacttgtttaatgacgaattcatagctgagaatatctttattcattccacaacaagtttttattctcttaattataacgataacgtcattaattataacggattatctcgctacaataactctatttttatcgttgatgaggcacataatatctttgggaataatactggagaacttatgaccgtgataaaaaataaaaacaagattccttttctactattgtctggatctcccattactaacacacctaatactctgggtcatattatagatttaatgtccgaagagacgatagattttggtgaaattattagtcgtggtaagaaagtaattcagacacttcttaacgaacgaggtgtgaatgtacttaaggatttgcttaaaggaagaatatcatattacgaaatgcctgataaagatctaccaacgataagatatcacggacgtaagtttctagatactagagtagtatattgtcacatgtctaaacttcaagagagagattatatgattactagacgacagctatgttatcatgaaatgtttgataaaaatatgtataacgtgtcaacggcagtattgggacaacttaatctgatgaataatttagatactttatttcaggaacaggataaggaattgtacccaaatctgaaaataaataatggcgtgttatacggagaagaattggtaacgttaaacattagttccaaatttaagtactttatcaatcggatacagacactcaacggaaaacattttatatacttttctaattctacatatggtggattggtaattaaatatatcatgctcagtaatggatattctgaatataatggttctcagggaactaatccacatatgataaacggcaaaccaaaaacatttgctatcgttactagtaaaatgaaatcgtctttagaggatctattagatgtgtataattctcctgaaaacgatgatggtagtcaattgatgtttttgttttcatcaaacattatgtccgaatcctatactctgaaagaggtaaggcatatttggtttatgactatcccagatactttttctcaatacaaccaaattcttggacgatctattagaaaattctcttacgccgatatttctgaaccagttaatgtatatcttttagccgccgtatattccgatttcaatgacgaagtaacgtcattaaacgattacacacaggatgaattaattaatgttttaccatttgacatcaaaaagctgttgtatctaaaatttaagacgaaagaaacgaatagaatatactctattcttcaagagatgtctgaaacgtattctcttccaccacatccatcaattgtaaaagttttattgggagaattggtcagacaatttttttataataattctcgtattaagtataacgactccaagttacttaaaatggttacatcagttataaaaaataaagaagacgctaggaattacatagatgatattgtaaacggtcacttctttgtatcgaataaagtatttgataaatctcttttatacaaatacgaaaacgatattattacagtaccgtttagactttcctacgaaccatttgtttggggagttaactttcgtaaagaatataacgtggtatcttctccataaaactgatgagatatataaagaaataaatgtcgagctttgttaccaatggatacctttccgttacattggaacctcatgagctgacgttagacataaaaactaatattaggaatgccgtatataagacgtatctccatagagaaattagtggtaaaatggccaagaaaatagaaattcgtgaagacgtggaattacctctcggcgaaatagttaataattctgtagttataaacgttccgtgtgtaataacctacgcgtattatcacgttggggatatagtcagaggaacattaaacatcgaagatgaatcaaatgtaactattcaatgtggagatttaatctgtaaactaagtagagattcgggtactgtatcatttagcgattcaaagtactgcttttttcgaaatggtaatgcgtatgacaatggcagcgaagtcactgccgttctaatggaggctcaacaaggtatcgaatctagttttgtttttctcgcgaatatcgtcgactcataagaaagagaatagcggtaagtataaacacgaatactatggcaataattgcgaatgttttattcccttcgatatatttttgataatatgaaaaacatgtctctctcaaatcggacaaccatctcataaaatagttctcgcgcgctggagaggtagttgctgctcgtataatctccccagaataatatacttgcgtgtcgtcgttcaatttatacggatttctatagttctctgttatataatacggttttccatcatgattagacgacgacaatagtgttctaaatttagatagttgatcagaatgaatgtttattggcgttggaaaaattatccatacagcgtctgcagagtgcttgatagttgttcctagatatgtaaaataatccaacgtactaggtagcaaattgtctagataaaatactgaatcaaacggcgcagacgtattagcggatctaatggaatccaattgattgactatcttttgaaaatatacatttttatgatccgatacttgtaagaatatagaaataatgataagtccatcatcgtgtttttttgcctcttcataagaactatattttttcttattccaatgaacaagattaatctctccagagtatttgtacacatctatcaagtgattggatccataatcgtcttcctttccccaatatatatgtagtgatgataacacatattcattggggagaaaccctccacttatatatcctcctttaaaattaatccttactagttttccagtgttctggatagtggttggtttcgactcattataatgtatgtctaacggcttcaatcgcgcgttagaaattgcttttttagtttctatattaataggagatagttgttgcggcatagtaaaaatgaaatgataactgtttaaaaatagctcttagtatgggaattacaatggatgaggaagtgatatttgaaactcctagagaattaatatctattaaacgaataaaagatattccaagatcaaaagacacgcatgtgtttgctgcgtgtataacaagtgacggatatccgttaataggagctagaagaacttcattcgcgttccaggcgatattatctcaacaaaattcagattctatctttagagtatccactaaactattacggtttatgtactacaatgaactaagagaaatctttagacggttgagaaaaggttctatcaacaatatcgatcctcacttcgaagagttaatattattgggtggtaaactagataaaaaggaatctattaaagattgtttaagaagagaattaaaagaggaaagtgatgaacgtataacagtaaaagaatttggaaatgtaattctaaaacttacaacacgggataaattatttaataaagtatatataagttattgcatggcgtgttttattaatcaatcgttggaggatttatcgcatactagtatttacaatgtagaaattagaaagattaaatcattaaatgattgtattaacgacgataaatacgaatatctgtcttatatttataatatgctagttaatagtaaatgaacttttacagatctagtataattagtcagattattaagtataatagacgactagctaagtctattatttgcgaggatgactctcaaattattacactcacggcattcgttaaccaatgcctatggtgtcataaacgagtatccgtgtccgctattttattaactactgataacaaaatattagtatgtaacagacgagatagttttctctattctgaaataattagaactagaaacatgtttagaaagaaacgattatttctgaattattccaattatttgtccaaacaggaaagaagtatactatcgtcatttttttctctatatccagctactgctgataatgatagaatagatgctatttatccgggtggcatacccaaaaggggtgagaatgttccagagtgtttatccagggaaattaaagaagaagttaatatagacaattcttttgtattcatagacactcggttttttattcatggcatcatagaagataccattattaataaattttttgaggtaatcttctttgtcggaagaatatctctaacgagtgatcaaatcattgatacatttaaaagtaatcatgaaatcaaggatctaatatttttagatccgaattcaggtaatggactccaatacgaaattgcaaaatatgctctagatactgcaaaactcaaatgttatggccatagaggatgttattacgaatcattaaaaaaattaactgaggatgattgattagaaaatataaattaatttaccatcgtgtatttttataacgggattgtccggcatatcatgtagatagttaccgtctacatcgtatactcgaccatctacgcctttaaatcctctatttattgacattaatctattagaattggaataccaaatattagtaccctcaattagtttattggtaatattttttttagacgatagatcgatggctcttgaaaccaaggttttccaaccggactcattgtcgatcggtgagaagtctttttcattagcatgaatccattctaatgatgtatgtttaaacactctaaacaattggacaaattcttttgatttgctttgaatgatttcaaataggtcttcgtctacagtaggcataccattagataatctagccattataaagtgcacgtttacatatctacgttctggaggagtaagaacgtgactattgagacgaatggctcttcctactatctgacgaagagacgcctcgttccaagtcatatctagaatgaagatatcattgattgagaagaagctaataccctcgcctccactagaagagaatacgcatgttttaatgcattctccgttagtgtttgattcttggttaaactcagccaccgccttgattctagtatcttttgttctagatgagaactctatattagagataccaaagactttgaaatatagtaataagatttctattcctgactgattaacaaatggttcaaagactagacatttaccatgggatgctaatattcccaaacatacatctataaatttgacgcttttctcttttaattcagtaaatagagagatatcagccgcactagcatcccctttcaatagttctccctttttaaaggtatctaatgcggatttagaaaactctctatttcttaatgaatttttaaaatcattatatagtgttgctatctcttgcgcgtattcgcccggatcacgattttgtctttcaggaaagctatcgaacgtaaacgtagtagccatacgtctcagaattctaaatgatgatatacctgtttttatttcagcgagtttagccttttgataaatttcttcttgctttttcgacatattaacgtatcgcattaatactgttttcttagcgaatgatgcagacccttctacgtcatcaaaaatagaaaactcgttattaactatgtacgaacataggcctcctagtttggagactaattctttctcatcaactagacgtttattctcaaatagcgattggtgttgtaaggatcctggtcgtagtaagttaaccaacatggtgaattcttgcacactattgacgataggtgtagccgataaacaaatcatcttatggttttttaacgcaatggttttagataaaaaattatatactgaacgagtaggacggatcttaccatcttctttgattaatgatttagaaatgaagttatgacattcatcaataatgacgcatattctactcttggaattaatagttttgatattagtaaaaaatttatttctaaaattttgatcatcgtaattaataaaaatacaatccttcgttatctctggagcgtatctgagtatagtgttcatccaaggatcttctatcaaagcctttttcaccaataagataatagcccaattcgtataaatatccttaagatgtttgagaatatatacagtagtcattgttttaccgacacccgtttcatggaacaataaaagagaatgcatactgtctaatcctaagaaaactcttgctacaaaatgttgataatccttgaggcgtactacgtccgaccccatcatttcaacaggcatattagtagttctgcgcaatgcataatcgatataggccgcgtgtgatttactcatttatgagtgataagtaataactatgttttaaaaatcacagcagtagtttaactagtcttctctgatgtttgttttcgatacttttcgaatcagaagtcatactagaataaagcagcgagtgaacgtaatagagagcttcgtatactctattcgaaaactctaagaacttattaatgaattccgtatccactggatcgtttaaaatactaaattgaacactgttcacatccttccaagaagaagacttagtgacggacttaacatgagacataaataaatccaaattttttttacaaacatcactagccaccataatggcgctatctttcaaccagctatcgcttacgcattttagcagtctaacatttttaaagagactacaatatattctcatagtatcgattacacctctaccgaataaagttggaagtttaataatacaatatttttcgtttacaaaatcaaataatggtcgaaacacgtcgaaggttaacatcttataatcgctaatgtatagattgttttcagtgagatgattattagatttaatagcatctcgttcacgtttgaacagtttattgcgtgcgctgaggtcggcaactacggcgtccgctttagtactcctcccataatactttacgctattaatctttaaaatttcatagactttatctagatcgctttctggtaacatgatatcatgtgtaaaaagttttaacatgtcggtcggcattctatttagatcattaactctagaaatctgaagaaagtaattagctccgtattccagactaggtaatgggcttttacctagagacagattaagttctggcaatgtttcataaaatggaagaaggacatgcgttccctcccggatattttttacaatttcatccatttacaactctatagtttgttttcattattattagttattatctcccataatcttggtaatacttaccccttgatcgtaagataccttatacaggtcattacatacaactaccaattgtttttgtacataatagattggatggttgacatccatggtggaataaactactcgaacagatagtttatctttccccctagatacattggccgtaatagttgtcggcctaaagaatatctttggtgtaaagttaaaagttagggttcttgttccattattgctttttgtcagtagttcattataaattctcgagatgggtccgttctctgaatatagaacatcatttccaaatctaacttctagtctagaaataatatcggtcttattcttaaaatctattcccttgatgaagggatcgttaatgaacaaatccttggcctttgattcggctgatctattatctccgttatagacgttacgttgactagtccaaagacttacaggaatagatgtatcgatgatgttgatactatgtgatatgtgagcaaagattgttctcttagtggcatcactatatgttccagtaatggcggaaaactttttagaaatgttatatataaaagaattttttcgtgttccaaacattagcagattagtatgaagataaacactcatattatcaggaacattatcaatttttacatacacatcagcatcttgaatagaaacgataccatcttctggaacctctacgatctcggcagactccggataaccagtcggtgggccatcactaacaataactagatcatccaacaatctactcacatatgcatctatataatctttttcatcttgtgagtaccctggatacgaaataaatttattatccgtatttccataataaggtttagtataaacagagagcgatgttgccgcatgaacttcagttacagtcgccgttggttggtttatttgacctattactctcctaggtttctctataaacgatggtttaatttgtacattcttaaccatatatccaataaagctcaattcaggaacataaacaaattctttgttgaacgtttcaaagtcgaacgaagagtcacgaataacgatatcggatactggattgaaggttaccgttacggtaatttttgaatcggatagtttaagactgctgaatgtatcttccacatcaaacggagttttaatataaacgtatactgtagatggttctttaatagtgtcattaggagttaggccaatagaaatatcattaagttcactagaatatccagagtgtttcaaagcaattgtattattgatacaattattatataattcttcgccctcaatttcccaaataacaccgttacacgaagagatagatacgtgattaatacatttatatccaacatatggtacgtaaccgaatcttcccatacctttaacttctggaagttccaaactcagaaccaaatgattaagcgcagtaatatactgatccctaatttcgaagctagcgatagcctgattgtctggaccatcgtttgtcataactccggatagagaaatatattgcggcatatataaagttggaatttgactatcgactgcgaagacattagaccgtttaatagagtcatccccaccgatcaaagaattaatgatagtattattcattttctatttaaaatggaaaaagcttacaataaactccgtagagaaatatctataatttgtgagttttccttaaagtaacagcttccgtaaacgccgtctttatctcttagtaagtttattgtatttataaccttttccttatcttcatagaatactaaaggcaacaaagaaatttttggttcttctctaagagctacgtgagacttaaccatagaagccaacgaatccctacatattttagaacagaaataccctacttcaccacccttgtatgtctcaatactaataggtctaaaaaccaaatcttgattacaaaaccaacacttatcaattacactatttgtcttaatagacacatctgccatagatttataatactttggtagtatacaagcgagtgcttcttctttagcgggcttaaagactgctttaggtgctgaaataaccacatctggaaggcttactcgcttagccatttaattacggaactatttttttatacttctaatgagcaagtagaaaacctctcatctacaaaaacgtactcgtgtccataatcctctaccatagtaacacgttttttagatctcatatgtgctaaaaagttttcccatactaattggttactattatttttcgtataatttttaacagtttgaggttttagatttttagttacagaagtgatatcgaatattttatccaaaaagaatgagtaattaattgtcttagaaggagtgttttcttggcaaaagaataccaagtgcttaaatatttctactacttcattaatcttttctgtactcagattcagtttctcatcttttacttgattgattatttcaaagactaacttataatcctttttatttattctctcgttagccttaagaaaactagatacaaaatttgcatctacatcatccgtggatatttgatttttttccatgatatccaagagttccgagataatttctccagaacattgatgagacaataatctccgcaatacatttctcaaatgaataagtttattagacacgtggaagtttgactttttttgtacctttgtacatttttgaaataccgactcgcaaaaaatacaatattcatatccttgttcagatactataccgttgtgtctacaaccgctacataatcgtagattcatgttaacactctacgtatctcgtcgtccaatattttatataaaaacattttatttctagacgttgccagaaaatcctgtaatatttttagttttttgggctgtgaataaagtatcgccctaatatggttaccgtcctccgccaatatagtagttaaattatccgcacatgcagaagaacacgcttaggcggattcagtacaatgttatatttttcgtaccaactcatttaaatatcataatctaaaatagttctgtaatatgtctagcgctaatatattgatcataatcctgtgcataaattaagatacaacaatgtctcgaaatcatcgacatggcttcttccatagttagaagatcgtcgtcaaagttagcaacgtgattcatcaacatttgctgttttgaggcagcaaatactgaaccatcgccattcaaccattcataaaaaccatcgtctgaatccattgataatttcttgtactggtttttgagagctcgcatcaatctagcatttctagctcccggattgaaaacagaaagaggatcgtacatccagggtccattttctgtaaatagaatcgtataatgtcccttcaagaagatatcagacgatccacaatcaaagaattggtctccgagtttgtaacaaactgcggactttaacctatacatgataccgtttagcataatttctggtgatacgtcaatcggagtatcatctattagagatctaaagccggtgtaacattctccaccaaacatattcttattctgacgtcgttctacataaaacatcattgctccattaacgataacaggggaatgaacagcactacccatcacattagttcccaatggatcaatgtgtgtaactccagaacatcttccatatcctatgttaggaggagcgaacaccactcttccactattgccatcgaatgccatagaataaatatccttggaattgatagaaatcggactgtcggatgttgtgatcatcttcataggattaacaacgatgtatggtgccgcctgaagtttcatatcgtaactgatgccgtttataggtctagccacagaaaccaacgtaggtctaaatccaactatagacaaaatagaagccaatatctgttcctcatctgtcataacttgagagcatccagtatgaataatcttcattagatggggatctaccgcatcatcatcgttacaataaaaaattcccattctaatgttcataattgcttttctaatcatggtatgcatgtttgctctctgaatctctgtggaaattagatctgatacacctgtaatcactatcggattatcctccgtaagacgattaaccaacaacatataattataagactttacttttctaaattcataaagttgctggattaggctataggtgtctccatgtacatacgcgttctcgagcgcaggaagtttaataccgaatagtgccatcagaataggatgaatatagtaattagtttctggttttctataaataaaagacaaatcttgtgaactagacatatcggtaaaatgcatggattggaatcgtgtagtcgacagaagaatatgatgattagatggagagtatattttatctaactctttgagttggtcaccgattctaggactagctcgagaatgaataagtactaaaggatgagtacatttcacagaaacactagcattgttcaatgtgctctttacatgggtaaggagttgaaatagctcgtttctatttgttctgacaatatttagtttattcataatgttaagcatatcctgaatagtaaagttagatgtgtcatacttgttagtagttagatatttagcaattgcattcccatcatttctcaatctcgtactccaatcatgtgtagatgctacttcatctatagaaaccatacaatcctttttgataggctgttgagattgattatttcctgcacgtttaggtttggtacgttgatttctagcccctgcggatataaagtcatcgtctacaatttgggacaatgaattgcatacactacaagacaaagatttatcagaagtgtgaatatgatcttcatctaccaaagaaagagtttgattagtataactagattttagtcctgcgttagatgttaaaaaaacatcgctattgaccacggcttccattatttatattcgtagtttttactcgaaagcgtgattttaatatccaatcttattacttttggaatcgttcaaaacctttgactagttgtagaatttgatctattgccctacgcgtatactcccttgcatcatatacgttcgtcaccagatcgtttgtttcggcctgaagttggtgcatatctttttcaacactcgacatgagatccttaagggccatatcgtctagattttgttgagatgctgctcctggatttggattttgttgtgctgttgtacatactgtaccaccagtaggtgtaggagtacatacagtggccacaataggaggttgaggaggtgtaaccgttggagtagtacaagaaatatttccatccgattgttgtgtacatgtagttgttggtaacgtctgagaaggttgggtagatggcggcgtcgtcgttttttgatctttattaaatttagagataatatcctgaacagcattgctcggcgtcaacgctggaaggagtgaactcgccggcgcatcagtatcttcagacagccaatcaaaaagattagacatatcagatgatgtattagtttgttgtcgtggttttggtgtaggagcagtactactaggtagaagaataggagccggtgtagctgttggaaccggctgtggagttatatgaatagttggttgtagcggttggataggctgtctgctggcggccatcatattatctctagctagttgttctcgcaactgtctttgataatacgactcttgagactttagtcctatttcaatcgcttcatcctttttcgtatccggatccttttcttcagaataatagattgacgactttggtgtagaggattctgccagcccctgtgagaacttgttaaagaagtccatttaaggctttaaaattgaattgcgattataagattaaatggcagacacagacgatattatcgactatgaatccgatgatctcactgaatacgaggatgatgaagaagaggaagaagatggagagtcactagaaactagtgatatagatcccaaatcttcttataagattgtagaatcagcatccactcatatagaagatgcgcattccaatcttaaacatatagggaatcatatatctgctcttaaacgacgctatactagacgtataagtctatttgaaatagcgggtataatagcagaaagctataacttgcttcaacgaggaagattacctctagtttcagaattttctgacgaaacgatgaagcaaaatatgctacatgtaattatacaagagatagaggagggttcttgtcctatagtcatcgaaaagaacggagaattgttgtcggtaaacgattttgacaaagatggtctaaaattccatctagactatattatcaaaatttggaaacttcaaaaacgatattagaatttatacgaatatcgttctctaaatgtcacaatcaagtctcgcatgttcagcaatttattgtcgtactttatatcgtgttcattaacgatatcttgcaaaatagtaatgattctatcttccttcgatagatattcttcagagattattgtcttatattctttcttgttatcagatatgaatttgataagactttgaacattattgatacccgtctgtttaattttttctacagatattttagttttggcagattctatcgtatctgtcaatagacatccaacatcgacattcgacgtcaattgtctataaatcaacgtataaattttagaaataacattagcgaattgttgtgcattgatgtcgttattctgaaacagtatgattttaggtagcattttcttaacaaagagaacgtatttattgttactcagttgaacagatgatatatccagattactaacgcatctgattccgtataccaaactttcagaagaaatggtatacaattgtttgtattcattcaatgtctctttttcagaaattagtttagagtcgaatactgcaataattttcaagagatagttttcatcagataagattttatttagtgtagatatgataaaactattgttttgttggagaacttgatacgccgcgttctctgtagtcgacgctctcaaatgggaaacaatctccattatttttttggaatcggatacaatatcttcggtatcttgacgcagtctagtatacatagagttaagagagattagagtttgtacattaagcaacatgtctctaaatgtggctacaaacttttccttttccacatcatctagtttattatataccgatttcacaacggcaccagatttaaggaaccagaatgaaaaactctgataactacaatatttcatcatagttacgattttatcatcttctatagttggtgtgatagcgcatacctttttctccaagactggaaccaacgtcataaaaatgtttaaatcaaaatccatatcaacatctgatgcgctaagaccagtctcgcgttcaagattatctttactaatggtgacgaactcatcgtataaaactctaagtttgtccattatttatttacagatttagttgtttaatttatttgtgctcttccagagttgggatagtatttttctaacgtcggtattatattattaggatctacgttcatatgtatcataatattaatcatccacgttttgataaatctatctttagcttctgaaataacgtatttaaacaaaggagaaaaatatttagctacggcatcagacgcaataacattttttgtaaatgtaacatatttagacgacagatcttcgttaaaaagttttccatctatgtagaatccatcagttgttaacaccattcccgcgtcagattgaataggagtttgaatagtttgttttggaaatagatccttcaataacttatagttgggtgggaaaaaatcgattttatcactagactctttcttttttactatcattacctcatgaactatttcttgaatgagtatatgtattttctttcctatatcggacgcgttcattggaaaatataccatgtcgttaactataagaatatttttatcctcgtttacaaactgaataatatcagatgtagttcgtaaacgaactatatcatcaccagcacaacatctaactatatgatatccactagtttcctttagtcgtttattatcttgttccatattagcagtcattccatcatttaagaaggcgtcaaagataatagggagaaatgacattttggattctgttacaactttaccaaaattaaggatatacggacttactatctttttctcaacgtcaatttgatgaacacacgatgaaaatgtacttcgatgagattgatcatgtagaaaacaacaagggatacaatatttccgcatatcatgaaatatattaagaaatcccaccttattatatttccccaaaggatccatgcacgtaaacattatgccgttatcattaataaagacttctttctcatcggatctgtaaaagttgttactgatttttttcattccaggatctagataattaataatgatgggttttctattcttattctttgtattttggcatatcctagaccagtaaacagtttccactttggtaaaatcagcagacttttgaacgctattaaacatggcattaatggcaataactaaaaatgtaaaatatttttctatgttaggaatatggtttttcactttaatagatatatggtttttggccaaaatgatagatatttttttatccgaggatagtaaaatattattagtcgccgtctctataaaaatgaagctagtctcgatatccaattttattctagaattgataggagtcgccaaatgtaccttatacgttatatctcccttgatgcgttccatttgtgtatctatatcggacacaagatctgtaaatagttttacgttattaatcatcacggtatcgccgtcgctagataatgctaatgtaccatccaagtcccaaatggagagatttaactgttcatcgtttagaataaaatgattaccggtcatattaataaagtgttcatcgtatctagataacaacgacttataattaatgtccaagtcttgaactcgctgaatgatcttttttaacccagttagttttagattggtacgaaatatattgttaaactttgattctacagtaatgtccaaatctagttgtggaaatacttccatcaacattgtttcaaacttgataatattattatctacatcttcgtacgatccaaattccggaatagatgtatcgcacgctctgaccacccagataaccaaaaagtcacacgctccaggatatacattgtataaaaagctatcgttttttagtagtgtttttttctgagtatatacgaagggattaaaaatagtattatcaacgtaactatattccaaattattcttatgagaatagataataatatcgtccttaatatctaacaaatttcctaaatatccctttaattgagtcattcgaagcgtcaatagaatatgtctcttaactatttccggctgttgtatatttaaatgacttcgtaaaaaataatatatgggcgacttctcatctatgtaatcatatggagtgagatatagggctcgttctacctcctgccccttacccacctgtaataccaattgcggacttactatatatcgcatatttatatcgtggggtaaagtgaaaatctactaccgatgatgtaagtcttacaatgttcgaaccagtaccagatcttaatttggaggcctccgtagaactaggggaggtaaatatagatcaaacaacacctatgataaaggagaatagcggttttatatcccgcagtagacgtctattcgcccatagatctaaggatgatgagagaaaactagcactacgattctttttacaaagactttattttttagatcatagagagattcattatttgttcagatgcgttgacgctgtaaaagacgtcactattaccaaaaaaaataacattatcgtggcgccttatatagcacttttaactatcgcatcaaaaggatgcaaacttacagaaacaatgattgaagcattctttccagaactatataatgaacatagtaagaaatttaaattcaactctcaagtatccatcatccaagaaaaactcggataccagtttggaaactatcacgtttatgattttgaaccgtattactctacagtagctctggctattcgagatgaacattcatctggcatttttaatatccgtcaagagagttatctggtaagttcattatctgaaataacatatagattttatctaattaatctaaaatctgatcttgttcaatggagtgctagtacgggcgctgtaattaatcaaatggtaaatactgtattgattacagtgtatgaaaagttacaactggtcatagaaaatgattcacaatttacatgttcattggctgtggaatcagaacttccaataaaattacttaaagatagaaatgaattatttacaaaattcattaacgagttaaaaaagaccagttcattcaagataagcaaacgcgataaggatacgctattaaaatattttacttaggactggagttagaatttatagacgactcatttcgtttatcattattactaccatcattattagtattcttcttgtcatcttgttcagaaatatacagcaatgctatacctaatactaaatacattatcatgctcgcaatggctctaacaacaacgaaccaaaatgaatttggtcgtagcttttgttcacaaaaatacataaagaaatgtctacataaatctatggcgccattggctacttgaaatagcgccagtcctcctacagattttaatatagctgtataacatgacatttattcatcatcaaaagagacagagtcaccatctgtcatatttagattttttttcatgtgttcaaagtatcctctactcatttcattataatagtttatcatacttagaattttaggacggatcaatgagtaagacttgactagatcgtcagtagtaatttgtgcatcgtctattctgcatccgcttcgtcgaataatgtatagcatcgctttgagattctccatagctatcaagtctttatacaatgacatggaaatatctgtgaatactttatacttctccaacatcgatgccttaacatcatcgcctactttagcattgaaaatacgttctattgtgtagatggatgtagcaagatttttaaacaacaatgccattttacacgatgattgcctcaagtctccaatcgtttgtttagaacgattagctacagagttcaacgcttggctgactagcatattattatctttagaaattgtattcttcaatgaggcgtttatcatatctgtgatttcgttagtcatattacagtctgactgggttgtaatgttatccaacatatcacctatggatacggtacacgtaccagcatttgtaataatcctatctaagatgttgtatggcattgcgcagaaaatatcttctcctgtaatatctccactctcgataaatctactcagattattcttaaatgccttattctctggagaaaagatatcagtgtccatcatttcattaatagtatacgcagaaaagataccacgagtatcaattctatccaagatacttatcggttccgagtcacagataatggtttcctctccttcgggagatcctgcatagaaatatctaggacaatagtttctatactgtctgtaactctgataatctctaaagtcactaactgataccatgaaattgagaagatcaaacgctgaagtaattaatttttctgcctcgtttttactacaactagttttcatcaatgtagtgacgatgtattgtttagttactcttggtctaatactgatgatagagatattattacttcccataatggatcttctagtagtcaccttaaagcccattgatgcaaatagcagatagataaagtcttggtatgactcctttctaatatagtacggactacctttgtcacccaactttatacccacataagccataacaacctctttaatagccgtttcatgaggtttatcagccatgagcctgagtagttggaagaatctcatgaatcccgtctcagaaagtcctatatgcatgatagatttatctttcctgggaaactctcgtatagtcatagatgaaatactcttcaaagtttctgaaataagattagtaacagtcttacctccgactactctaggtaacaaacaaactctaataggtgttttctctgcggagataatatcagaaaggatagagcaataagtagtattattgtgattataaagaccgaatacataacaggtagaatttataaacatcatgtcctgaaggtttttagacttgtattcctcgtaatccataccgtcccaaaacatggatttggtaactttgatagccgtagatctttgttccttcgccaacaggttaaagaaattaataaagaatttgttgtttctatttatgtccacaaattgcacgtttggaagcgccacggttacattcactgcagcattttgaggatcgcgagtatgaagtacgatgttattgtttactggtatatctggaaagaaatctaccagtctaggaataagagattgatatcgcatagaaatacaaaagttcataatctcatcatcgaagagcattttgttaccattgtaataaatatccactctgtcatatgtataaatgaagtactgttcaaacatgatgagatgtttatatgttggcatagtagtgagatcgacgtttggtaatggcaatgtattaagattaactccataatgtctagcagcatctgcgatgttataagtgttgtcaaagcggggtcgatcttgtgctgttatatattgtctaacacctataagattatcaaaatcttgtctgcttaatacaccgttaacaatttttgccttgaattcttttattggtgcattaataacatccttatagaggatgttaaacaaataagtattatcaaagttaagatctgggtatttcttttctgctagaacatccattgagtcggagccatctggtttaatataaccaccgataaatctagctctgtattctgtatccgtcaatctaatattaagaaggtgttgagtgaaaggtggaagatcgtaaaagctgtgagtattaatgataggattagtttccgaactaatgttaattggggtattaataatatctatatttccagcgttaagtgtaacattaaacagttttaattcacgtgacgtggtatcaattaaataattaatgcccaatttggatatagcagcctgaagctcatcttgtttagttacggatcctaatgagttattaagcaatatatcgaacggatgaacgaaggttgttttgagtttgtcgcatactttgtaatctagacatagatgcggaagaacggtagaaactatacgaaataaatattcagagtcctctaattgatcaagagtaactattgacttaataggcatcatttatttagtattaaatgacgaccgtaccagtgacggatatacaaaacgatttaattacagagttttcagaagataattatccatctaacaaaaattatgaaataactcttcgtcaaatgtctattctaactcacgttaacaacgtggtagatagagaacataatgccgccgtagtgtcatctccagaggaaatatcctcacaacttaatgaagatctatttccagatgatgattctccggccactattatcgaaagagtacaacctcatactactattattgacgatactccacctcctacgtttcgtagagagttattgatatcggaacaacgtcaacaacgagaaaaaagatttaatattacagtatcgaaaaatgctgaagcaataatggaatctagatctatgatatcttctatgccaacacaaacaccatccttgggagtagtttatgataaagataaaagaattcagatgttggaggatgaagtggttaatcttagaaatcaacgatctaatacaaaatcatctgataatttagataattttaccagaatactatttggtaagactccgtataaatcaacagaagttaataagcgtatagccatcgttaattatgcaaatttgaacgggtctcccttatcagtcgaggacttggatgtttgttcagaggatgaaatagatagaatctataaaacgattaaacaatatcacgaaagtagaaaacgaaaaattatcgtcactaacgtgattattattgtcataaacattatcgagcaagcattgctaaaactcggatttgaagaaatcaaaggactgagtaccgatatcacttcagaaattatcgatgtggagatcggagatgactgcgatgctgtagcatctaaactaggaatcggtaacagtccggttcttaatattgtattgtttatactcaagatattcgttaaacgaattaaaattatttaatttaatacattcccatatccagacaacaatcgtctggattaatctgttcctgtcgtctcataccggacgacatattaatctttttattagtaggcatctttttagatggtttctttttcccagcattaactgagtcgatacctagaagatcgtgattgatctctccgaccattccacgaacttctaattggccgtctctgacggtaccataaactattttaccagcattagtaacagcttggacaatctgaccatccatcgcattgtacgatgtagtagtaactgttgttctacgtctaggagcaccagaagtatttttggagcccttggaggttgatgtagaagaagacgaggattttgattttggtttacatgtaatacattttgaactctttgattttgtatcacatgcgccggcagtcacatctgtttgagaattaagattattgttgcctcctttgacggctgcatctccaccgatttgcgctagtagatttttaagctgtggtgtaatcttattaactgtttcgatataatcatcgtaactgcttctaacggctaaattttttttatccgccatttagaagctaaaaatatttttatttatacagaagatttaactagattatacaatgaactaatatgatccttttccagattatttacaaacttggtattttttggttctggaggaggcgaatttaaattcggacttggattcggattttgtgagttcttgatcttattatacatcgagtataggatggcgacggtaactgctacgcaaataccgatcaacaaaagaataccaatcatttattgacaataacttcactattgatcaagtatgcaatatatcatcttttcactaaataagtagtaataatgattcaacaatgtcgagatatatggacgataataatttagttcatggaaatatcgctatgattggtatgaatgactccgctaactctgtggggtgcgcagtgctttccccacatagaataaattagcattccgactgtgataataataccaagtataaacgccataatactcaatactttccatgtacgagtgggactggtagacttactaaagtcaataaaggcgaagatacacgaaagaatcaaaagaatgattccagcgattagcacgccggaaaaataatttccaatcataagcatcatgtccatttaactaataaaaattttaaatcgccgaatgaacaaagtggaatataaaccatataaaaacaatagtttgtactgcaaaaataatatctatttttgttttcgaagatatggtaaaattaaatagtagtacacagcatgttataactaacagcagcaacggctcgtaattacttatcatttactagacgaaaaggtggtgggatattttcttgctcaaataatacgaatatatcacccatccattttatgcgatgtttatatactctaatctttaatagatctatagacgacgggtttaccaacaatatagattttatcgattcatctaatttaaacccttccttaaacgtgaatgatctattatctggcataacgatgactctacctgatgaatcggacaatgtactgggccatgtagaataaattatcaacgaattatcgtctacgaacatttatatcatttgttttaattttaggacgcgaataaatagatataaaatagaaaataacagatattacaaccaatgttatggccgcgcccaaccaggtaggcagttttattttatcttttactacaggttctcctggatgatgtacgtcaccaacggcggacgtagttctagtacaattagacgtaagttctgcttgggaattttttaacgctaaagagttaacgttaatcgtgcacccaacgtatttacatctagttctttgaacatcttgattataatataaccattttctatctctagattcgtcggtgcactcatgtaaccaacataccctaggtcctaaatatttatctccggaattagattttggataattcgcgcaccaacaatttctatttcctttatgatcgttacaaaagacgtataatgccgtatccccaaaagtaaaataatcaggacgaataattctaataaactcagaacaatatctcgcatccatatgtttggagcaaatatcggaataagtagacatagccggtttccgttttgcacgtaaccattctaaacaattggggtttccaggatcgtttctacaaaatccagtcatgaaatcgtcacaatgttctgtcttgtaattattattaaatatttttggacagtgtttggtatttgtcttagaacaacattttgctacgctatcactatcgcccaggagataatccttttttataaaatgacatcgttgcccggatgctatataatcagtagcgtgttttaaatccttaatatattcaggagttacctcgttctgataatagattaatgatccaggacgaaatttgaaagaactacatggttctccatgaattaatacatattgtttagcaaattcaggaactataaaactactacaatgatctatcgacataccatctatcaaacaaaatttgggtttaatttctcccggagatgtttcataatagtacgtataactttcttctgcaaacttaacagctctattatattcaggataattaaaacctaattccatatatttgtctcgtatatctgctattcctggtgctattttgattctattaagagtaacagctgcccccattcttaataatcgtcagtatttaaactgttaaatgttggtatatcaacatctaccttatttcccgcagtataaggtttgttgcaggtatactgttcaggaatggttacatttatacttcttctatagtcctgtctttcgatgttcatcacatatgcaaagaacagaataaacaaaataatgtaagaaataatattaaatatctgtgaattcgtaaatacattgattgccataataattacagcagctacaatacacacaatagacattcccacagtgttgccattacctccacgatacatttgagttactaagcaataggtaataactaagctagtaagaggcaatagaaaagatgagataaatatcatcaatatagagattagaggagggctatatagagccaagacgaacaaaatcaaaccgagtaacgttctaacatcattatttttgaagattcccaaataatcattcattcctccataatcgttttgcatcatacctccatctttaggcataaacgattgctgctgttcctctgtaaataaatctttatcaagcactccagcacccgcagagaagtcgtcaagcatattgtaatatcttaaataactcatttatatattaaaaaatgtcactattaaagatggagtataatctttatgccgaactaaaaaaaatgacttgtggtcaacccctaagtctttttaacgaagacggggatttcgtagaagttgaaccgggatcatcctttaagtttctgatacctaagggattttacgcctctccttccgtaaagacgagtctagtattcgagacattaacaacgaccgataataaaatcactagtatcaatccaacaaatgcgccaaagttatatcctcttcaacgcaaagtcgtatctgaagtagtttctaatatgaggaaaatgatcgaatcaaaacgtcctctatacattactcttcacttggcgtgtggatttggtaagactattaccacgtgttatcttatggctacacacggtagaaaaaccgtcatttgcgtacccaataaaatgttaatacatcaatggaagacacaggtagaggcagtcggattggaacataagatatccatagatggagtaagtagtctattaaaggaactaaagactcaaagtccggatgtattaatagtagtcagtagacatctgacaaacgatgccttttgtaaatatatcaataagcattatgatttgttcatcttggatgaatcacatacgtataatctgatgaacaatacagcagttacaagatttttagcgtattatcctccgatgatgtgttattttttaactgctacacctagaccagctaaccgaatttattgtaacagtattattaatattgccaagttatccgatctaaaaaaaactatctatgcggtagatagtttttttgagccatattccacagataatattagacatatgataaaacgattagatggaccatctaataaatatcatatatatactgagaagttattatctgtagacgagcctagaaatcaacttattcttgataccctggtagaagaattcaagtcaggaactattaatcgaattttagttattactaaactacgtgaacatatggtattcttctacaaacgattattagatcttttcggaccagaggttgtatttataggagacgcccaaaatagacgtactccagatatggtcaaatcaatcaaggaactaaatagatttatattcgtatccaccttattttattccggtactggtttagatattcctagtttggattcgttgttcatttgctcggcagtaatcaacaatatgcaaatagagcaattactagggagggtatgtcgagaaacagaactattagataggacggtatatgtatttcctagcacatccatcaaagaaataaagtacatgataggaaatttcatgcaacgaattattagtctgtctgtagataaactaggatttaaacaaaaaagttatcggaaacatcaagaatccgatcccacttctgtatgtacaacatcctccagagaagaacgtgtattaaatagaatatttaactcgcaaaatcgttaagaagtttaagcgacgatccgcatgctgcgcaggccagtgtattacccctcatagtattaatataatccaatgatacttttgtgatgtcggaaatcttaaccaatttagactgacaggcagaacacgtcatgcaatcatcatcgtcatcgataactgtagtcttgggcttctttttgcggctcttcattccggaacgcacattggtgctatccatttaggtagtaaaaaataagtcagaatatgccctatagcacgatcgtgcaaaacctggtatatcgtctctatctttatcacaatatagtgtatcgacatctttattattattgacttcgtttatcttggaacatggaatgggaacatttttgttatcaacggccacctttgccttaattccagatgttgtaaaattataactaaacagtctatcatcgacacaaatgaaattcttgtttagacgtttgtagtttacgtatgcggctcgttcgcgtctcattttttcagatattgcaggtactataatattaaaaataagaatgaaataacataggattaaaaataaagttatcatgacttctagcgctgatttaactaacttaaaagaattacttagtctgtacaaaagtttgagattttcagattctgcggctatagaaaagtataattctttggtagaatggggaacatctacttactggaaaataggcgtgcaaaaggtagctaatgtcgagacgtcaatatctgattattatgatgaggtaaaaaataaaccgtttaatattgatccgggctattacattttcttaccggtatattttgggagcgtctttatttattcgaagggtaaaaatatggtagaacttggatctggaaactcttttcaaataccagatgatatgcgaagtgcgtgtaacaaagtattagacagcgataacggaatagactttctgagatttgttttgttaaacaatagatggataatggaagatgctatatcaaaatatcagtctccagttaatatatttaaactagctagtgagtacggattaaacatacccaaatatttagaaattgaaatagaggaagacacattatttgacgacgagttatactctattatagaacgctcttttgatgataaatttccaaaaatatccatatcgtatattaagttgggagaacttagacggcaagttgtagactttttcaaattctcgttcatgtatattgagtccatcaaggtagatcgtataggagataatatttttattcctagcgttataacaaaatcaggaaaaaagatattagtaaaagatgtagaccatttaatacgatccaaggttagagaacatacatttgtaaaagtaaaaaagaaaaacacattttccattttatacgactatgatggaaacggaacagaaactagaggagaagtaataaaacgaattatagacactataggacgagactattatgttaacggaaagtatttctctaaggttggtagtgcaggcttaaagcaattgactaataaattagatattaatgagtgcgcaactgtcgatgagttagttgatgagattaataaatccggaactgtaaaacgaaaaataaaaaaccaatcagcatttgatttaagcagagaatgtttgggatatccagaagcggattttataacgttagttaataacatgcggttcaaaatagaaaattgtaaggttgtaaatttcaatattgaaaatactaattgtttaaataacccgagtattgaaactatatatagaaactttaaccagttcgtctcaatctttaatgtcgtcaccgatgtcaaaaaaagattattcgagtgaaataatatgcgcctttgatataggtgcaaaaaatcctgccagaactgttttagaagtcaaggataactccgttagggtattggatatatcaaaattagactggagttctgattgggaaaggcgcatagctaaagatttgtcacaatatgaatacactacagttcttctagaacgtcagcctagaaggtcgccgtatgttaaatttatctattttattaaaggctttttatatcatacatcggctgccaaagttatttgcgtctcgcctgtcatgtctggtaattcatatagagatcgaaaaaagagatcggtcgaagcatttcttgattggatggacacattcggattgcgagactccgttccggatagacgcaaattagacgatgtagcggatagtttcaatttggctatgagatacgtattagataaatggaatactaattatacaccttataataggtgtaaatctaggaattacataaaaaaaatgtaataacgttagtaacgccattatggataatctatttacctttctacatgaaatagaagatagatatgccagaactatttttaactttcatctaataagttgcgatgaaataggagatatatatggtcttatgaaagaacgaatttcctcagaggatatgtttgataatatagtgtataataaagatatacatcatgccattaagaaactagtgtattgcgacatccaacttactaaacacattattaatcagaatacgtatccggtatttaacgattcttcacaagtgaaatgttgtcattatttcgatataaactcagataatagcaatattagctctcgtacagtagagatatttgagagggaaaagtcatctcttgtatcatatattaaaactaccaataagaagagaaaggtcaattacggcgaaataaagaaaactgttcatggaggcactaatgcaaattacttttccggtaaaaagtctgatgagtatctgagtactacagttagatccaacattaatcaaccttggatcaaaaccatttctaagagaatgagagtagatatcattaatcactctatagtaacgcgtggaaaaagctctatattacaaactatagaaattatttttactaatagaacatgtgtgaaaatattcaaggattctactatgcacattattctatccaaggacaaggatgaaaaggggtgtatacacatgattgacaaattattctatgtctattataatttatttctgttgttcgaagatatcatccaaaacgagtactttaaagaagtagctaatgttgtaaaccacgtacttacggctacggcattagatgagaaattattcctaattaagaaaatggctgaacacgatgtttatggagttagcaatttcaaaatagggatgtttaacctgacatttattaagtcgttggatcataccgttttcccctctctgttagatgaggatagcaaaataaagttttttaaggggaaaaagctcaatattgtagcattacgatctctggaggattgtataaattacgtgactaaatccgagaatatgatagaaatgatgaaggaaagatcgactattttaaatagcatagatatagaaacggaatcggtagatcgtctaaaagaattgcttctaaaatgaaaaaaaacactgattcagaaatggatcaacgactcggatataagtttttggtgcctgatcctaaagccggagttttttatagaccgttacatttccaatatgtatcgtattctaattttatattgcatcgattgcatgaaatcttgaccgtcaagcggccactcttatcgtttaagaataatacagaacgaattatgatagaaattagcaatgttaaagtgactcctccagattactcacctataatcgcgagtattaaaggtaagagttatgacgcattagccacgttcactgtaaatatctttaaagaggtaatgaccaaagagggtatatccatcactaaaataagtagttatgagggaaaagattctcatttgataaaaattccgctactaataggatacgggaataaaaatccacttgatacagccaagtatcttgttcctaatgtcataggtggagtctttatcaataaacaatctgtcgaaaaagtaggaattaatctagtagaaaagattacaacatggccaaaatttagggttgttaagccaaactcattcactttctcgttttcctccgtatcccctcctaatgtattaccgacaagatatcgccattacaagatatctctggatatatcacaattggaagcgttgaatatatcatcgacaaagacatttataacggtcaatattgttttgctgtctcaatatttatctagagtgagtctagaattcattagacgtagcttatcatacgatatgcctccagaagttgtctatctagtaaacgcgataatagatagtgctaaacgaattactgaatctattactgactttaatattgatacatacattaatgacctggtggaagctgaacacattaaacaaaaatctcagttaacgatcaacgagttcaaatatgaaatgctgcataactttttacctcatatgaactatacacccgatcaactaaagggattttatatgatatctttactaagaaagtttctctactgtatctaccacacttctagatatccagatagagattcgatggtttgtcatcgtatactaacatacggcaaatattttgagacgttggcacatgatgaattagagaattacataggcaacatccgaaacgatatcatgaacaatcacaagaacagaggcacttacgcggtaaacattcatgtactaacaactcctggacttaatcatgcattttctagcttattgagtggaaagttcaaaaagtcagacggtagttatcgaacacatcctcactattcatggatgcagaatatttctattcctaggagtgttggattttatccggatcaagtaaagatttcaaagatgttttctgtcagaaaataccatccaagtcaatatctttacttttgttcatcagacgttccggaaagaggtcctcaggtaggtttagtatctcaattgtctgtcttgagttccattacaaatatactaacgtctgagtatttggatttggaaaagaaaatttgtgagtatatcagatcatattataaagatgatataagttactttgaaacaggatttccaatcactatagaaaatgctctagtcgcatctcttaatccaaatatgatatgtgattttgtaactgactttagacgtagaaaacggatgggattcttcggtaacttggaggtaggtattactttagttagggatcacatgaatgaaattcgcattaatattggagcgggaagattagtcagaccattcttggttgtggataacggagagctcatgatggatgtgtgtccggagttagaaagcagattagacgatatgacattctctgacattcagaaagagtttccacatgtcatcgaaatggtagatatagaacaatttacttttagtaacgtatgtgaatcggttcaaaaatttagaatgatgtcaaaggatgaaagaaagcaatacgatttatgtgactttcctgccgaatttagagatggatatgtggcatcttcattagtgggaatcaatcacaattctggacccagagctattcttggatgtgctcaagctaaacaagctatctcttgtctgagttcggatatacgaaataaaatagacaatggaattcatttgatgtatccagagaggccaatcgtgattagtaaggctttagaaacttcaaagattgcggctaattgcttcggccaacatgttactatagcattaatgtcgtacaaaggtatcaatcaagaggatggaattatcatcaaaaaacaatttattcagagaggcggtctcgatatagttaccgcaaagaaacatcaagtagaaattccgttggaaaactttaataacaaagaaagagataggtctaatgcatattcgaaattagaaagtaatggattagttagactgaatgctttcttggaatccggagacgctatggcacgaaatatctcatcaagaactcttgaagatgattttgctagagataatcagattagcttcgatgtttccgagaaatataccgatatgtacaaatctcgcgttgaacgagtacaagtagaacttactgacaaagttaaggtacgagtattaaccatgaaagaaagaagacccattctaggagacaaatttaccactagaacgagtcaaaagggaacagtcgcgtatgtcgcggatgaaacggaacttccatacgatgaaaatggtatcacaccagatgtcattattaattctacatccatcttctctagaaaaactatatctatgttgatagaggttattttaacagccgcatattctgctaagccgtacaacaataagggagaaaaccgacctgtctgttttcctagtagtaacgaaacatccatcgatacatatatgcaattcgctaaacaatgttatgagcattcaaatccgaaattgtctgatgaagaattatcggataaaatcttttgtgaaaagattctctatgatcctgaaacggataagccttatgcatccaaagtattttttggaccaatttattacttgcgtctgaggcatttaactcaggacaaggcaaccgttagatgtagaggtaaaaagacgaagctcattagacaagcgaatgagggacgaaaacgtggaggaggtattaagtttggagaaatggagagagactgtttaatagcgcatggcgcagccaatactattacagaagttttgaaagattcggaagaagattatcaagatgtgtatgtttgtgaaaattgtggagacatagcagcacaaatcaagggtattaatacatgtcttagatgttcaaaacttaatctctctcctctcttaacaaaaattgataccacgcacgtatctaaagtatttcttactcaaatgaacgccagaggcgtaaaagtcaaattagatttcgaacgaaggcctccttcgttttataaaccattagataaagttgatctcaagccgtcttttctggtgtaatattctagtttggtagtagatacatatcaatatcatcaaattcgagatccgaattataaaatgggcgtggattgttaactatagaatcggacgtctgatattcgaaaatctgtggagtttcaggttttggtggaggtgtaactgctacttgggatactgaagtctgatattcagaaagctgggggatgttctggttcgacatccaccgatggtgtcacatcactaatcggttcggtaacgtctgtggatggaggtgctacttctacagaacctgtagcctcagttgtcaacggagatacatttttaatgcgaggaaatgtataatttggtaatggtttctcatgtggatctgaagaagaggtaagatatctactagaaagataccgatcacgttctagttctcttttgtagaacttaactttttctttctcagcatctagttgatattccaacctcttcacgttactacgttcagatttcaattcacgttcgcatgggttacctccgcagtttttacgagcgatttcacgttcagccttcatgcgtctctgtgatccgtttacgttaaaccataaatacatgggtgatcctataaacatgaatttatttctaattctcagagctatagttaattgaccgtgtaatatttgcttacatgcatacttgatacgctcattaataagatttttatcattgctcgttatctcagaatcgtatatataaggagtaccatcgtgattcttaccagatattatacaaaatactatatataaaatatattgaccaacgttagtaatcatataaatgtttaacgttttaaattttgtattcaatgatccattatcatacgctagcatggtcttatgatattcattctttaaaatataatattgtgttagccattgcattggagctcctaatggagattttctattctcgtccattttaggatatgctttcataaagtccctaataacttcgtgaataatgtttctatgttttctactgatgcatgtatttgcttcgatttttttatcccatgtttcatctatcatagatttaaacgcagtaatgctcgcaacattaacatcttgaaccgttggtacaattccgttccataaatttataatgttcgccatttatataactcattttttgaatatacttttaattaacaaaagagttaagttactcatatggacgccgtccagtctgaacatcaatctttttagccagagatatcatagccgctcttagagtttcagcgtgattttccaacctaaatagaacttcatcgttgcgtttacaacacttttctatttgttcaaactttgttgttacattagtaatctttttttccaaattagttagccgttgtttgagagtttcctcattgtcgtcttcatcggctttaacaattgcttcgcgtttagcctctggctttttatcagcctttgtagaaaaaaattcagttgctggaattgcaagatcgtcatctccggggaaaagagttccgtccatttaaagtacagattttagaaactgacactctgcgttatttatatttggtacaacacatggattataaatattgatgttaataacatcagaaaatgtaaagtctatacattgttgcatcgtgttaaattttctaatggatctagtattattgggtccaacttctgcctgaaatccaaatatggaagcggatacaaaaccgtttcctggataaaccacacatctccacttttgctttacatcagaaattgtgtcgttgacatcttgaactctcctatctaatgccggtgttccacctatagattttgaatattcgaatgctgcatgagtagcattaaattccttaatattgccataattttcatatattgagtaaccctggataaaaagtaaacacaccgcagccgtcgctaccacaataaaaaaaattgatagagagttcatttataatctattagaagctgacaaaatttttttacacgcatcagacaatgctttaataaatagttcaacatctacttttgtcatatcgaaccgatggtatgattctaacctagaattacatccgaaaaagttgactatgttcatagtcattaagtcattaacaaacaacattccagactctggattataagacgatactgtttcgtcacaatcacctaccttaatcatgtgattatgaatattggctattagagcaccttctaagaaatctataatatctttgaaacacgatttaaaatcaaaccacgaatatacttctacgaagaaagttagtttacccataggagagataactataaatggagatctaaatacaaaatccggatctatgatagttttaacattattatattctctattaaatacctccacatctaaaaatgttaattttgaaactatgtcttcgtttattaccgtacctgaactaaacgctataagctctattgtttgagaactctttaaacgatattcttgaaatacatgtaacaaagtttcctttaactcggtcggtttatctaccatagttacagaatttgtatccttatctataatataataatcaaaatcgtataaagttatataattatcgcgttcagattgggatcttttcaaatagactaaaaaccccatttctctagtaagtatcttatgtatatgtttgtaaaatatcttcatggtgggaatatgctctaccgcagttagccattcctcattgacagcggtagatgtattagacaaaactattccaatgtttaacaagggccattttacgagattattaaatccttgtttgataaatgtagccaatgagggttcgagttcaacgacgattgaattctcttcccgcggatgctgcatgatgaacgacgggatgttgttcgattgatttggaattctttttcgactttttgtttatattaaatattttaaaatttatagctgatagcaattcatgtaccacggataatgtagacgcgtattgcgcatcgatatctttattattagataaatttatcaataaatgtgagaagtttgcctcgttaaggtcttccatttaaatattatataaacatttgtgtttgtatcttattcgtcttttatggaatagttttttactagtaaagctgcaattacacactttgtccgtaaaacataaatataaacaccagcttttatcaatcgttccaaaaagtcgacggcggacatttttaacatggcatctattttaaatacacttaggtttttggaaaaaacatcattttataattgtaacgattcaataactaaagaaaagattaagattaaacataagggaatgtcatttgtattttataagccaaagcattctaccgttgttaaatacttgtctggaggaggtatatatcatgatgatttggttgtattggggaaggtaacaattaatgatctaaagatgatgctattttacatggatttatcatatcatggagtgacaagtagtggagtaatttacaaattgggatcgtctatcgatagactttctctaaataggactattgttacaaaagttaataattatgatgatacattttttgacgacgatgattgatcgctattgcacaattttgtttttttactttctaatatagcgtttagattctttttcatgtgcgaatattgatttactaaaatatcgatgtttaacttttgttctatgacgtccttatcggcggtatcggtacatatacgtaattcaccttcacaaaatacggagtcttcgataataatagccaatcgattattggatctagctgtctgtatcatattcaacatgtttaatatatcctttcgtttcccctttacaggcatcgatcgtagcatattttccgcgtctgagatggaaatgttaaaactacaaaaatgcgtaatgttagcccgtcctaatattggtacgtgtctataagtttggcatagtagaataatagacgtgtttaaatgccttccaaagtttaagaattctattagagtattgcattttgatagtttatcgcctacatcatcaaaaataagtaaaaagtgtgctgattttttatgattttgtgcgacagcaatacatttttctatgttacttttagttcgtatcagattatattctagagattcctgactactaacgaaattaatatgatttggccaaatgtatccatcataatctgggttataaacgggtgtaaacaagaatatatgtttatattttttaactagtgtagaaaacagagatagtaaatagatagtttttccagatccagatcctcccgttaaaaccattctaaacggcatttttaataaattttctcttgaaaattgtttttcttggaaacaattcataattatatttacagttactaaattaatttgataataaatcaaaatatggaaaactaaggtcgttagtagggaggagaacaaagaaggcatatcgtgatataaataacatttattatcatgatgacaccagaaaacgacgaagagcagacatctgtgttctccgctactgtttacggagacaaaattcaaggaaagaataaacgcaaacgcgtgattggtctatgtattagaatatctatggttatttcactactatctatgattaccatgtccgcgtttctcatagtgcgcctaaatcaatgcatgtctgctaacgaggctgctattactgacgccgctgttgccgttgctgctgcatcatctactcatagaaaggttgcgtctagcactacgcaatatgatcacaaagaaagctgtaatggtttatattaccagggttcttgttatatattacattcagactaccagttattctcggatgctaaagcaaattgcactgcggaatcatcaacactacccaataaatccgatgtcttgattacctggctcattgattatgttgaggatacatggggatctgatggtaatccaattacaaaaactacatccgattatcaagattctgatgtatcacaagaagttagaaagtatttttgtgttaaaacaatgaactaatatttatttttgtacattaataaatgaaatcgcttaatagacaaactgtaagtatgtttaagaagttgtcggtgccggccgctataatgatgatactctcaaccattattagtggcataggaacatttctgcattacaaagaagaactgatgcctagtgcttgcgccaatggatggatacaatacgataaacattgttatctagataccaacattaaaatgtccacagataatgcggtttatcagtgtcgtaaattacgagctagattgcctagacctgatactagacatctgagagtattgtttagtattttttataaagattattgggtaagtttaaaaaagaccaataataaatggttagatattaataatgataaagatatagatattagtaaattaacaaattttaaacaactaaacagtacgacggatgctgaagcgtgttatatatacaagtctggaaaactggttaaaacagtatgtaaaagtactcaatctgtactatgtgttaaaaaattctacaagtgacaacaaaaaatgaattaataataagtcgttaacgtacgccgccatggacgccgcgtttgttattactccaatgggtgtgttgactataacagatacattgtatgatgatctcgatatttcaatcatggactttataggaccatacattataggtaacataaaaactgtccaaatagatgtacgggatataaaatattccgacatgcaaaaatgctactttagctataagggtaaaatagttcctcaggattctaatgatttggctagattcaacatttatagcatttgtgccgcatacagatcaaaaaataccatcatcatagcatgcgactatgatatcatgttagatatagaagataaacatcagccattttatctattcccatctattgatgtttttaacgctacaatcatagaagcgtataacctgtatacagctggagattatcatctaatcatcaatccttcagataatctgaaaatgaaattgtcgtttaattcttcattctgcatatcagacggcaatggatggattataattgatgggaaatgcaatagtaattttttatcataaaagttgtaaagtaaataataaaacaataaatattgaactagtagtacgtatattgagcaatcagaaatgatgctggtacctcttatcacggtgacagtagttgcgggaacaatattagtatgttatatattatatatttgtaggaaaaagatacgtactgtctataatgacaataaaattatcatgacaaaattaaaaaagataaagagttctaattccagcaaatctagtaaatcaactgatagcgaatcagactgggaggatcactgtagtgctatggaacaaaacaatgacgtagataatatttctaggaatgagatattggacgatgatagcttcgctggtagtttaatatgggataacgaatccaatgttatggcgcctagcacagaacacatttacgatagtgttgctggaagcacgctgctaataaataatgatcgtaatgaacagactatttatcagaacactacagtagtaattaatgaaacggagactgttgaagtacttaatgaagataccaaacagaatcctaactattcatccaatcctttcgtaaattataataaaaccagtatttgtagcaagtcaaatccgtttattacagaacttaacaataaatttagtgagaataatccgtttagacgagcacatagcgatgattatcttaataagcaagaacaagatcatgaacacgatgatatagaatcatcggtcgtatcattggtgtgattagtttcctttttataaaattgaagtaatatttagtattattgctgccgtcacgttgtacaaatggagatattccctgtattcggcatttctaaaattagcaattttattgctaataatgactgtagatattatatagatacagaacatcaaaaaattatatctgatgagatcaatagacagatggatgaaacggtacttcttaccaacatcttaagcgtagaagttgtaaatgacaatgagatgtaccatcttattccccatagactatcgactattatactctgtattagttctgtcggaggatgtgttatctctatagataatgacgtcaatggcaaaaatattctaacctttcccattgatcatgctgtaatcatatccccactgagtaaatgtgtcgtagttagcaagggtcctacaaccatattggttgttaaagcggatatacctagcaaacgattggtaacatcgtttacaaacgacatactgtatgtaaacaatctatcactgattaattatttgccgttgtctgtattcattattagacgagttaccgactatttggatagacacatatgcgatcagatatttgcgaataataagtggtattccattataaccatcgacaataagcagtttcctattccatcaaactgtataggtatgtcctctgccaagtacataaattctagcatcgagcaagatactttaatacatgtttgtaacctcgagcatccattcgacttagtatacaaaaaaatgcagtcgtacaattctgtacctatcaaggaacaaatattgtacggtagaattgataatataaatatgagcattagtatttctgtgtattaatagatttctagtatggggatcattaatcatctctaatctctaaatacctcataaaacgaaaaaaaagctattatcaaatactgtacggaatggattcattctcttctctttttatgaaactctgttgtatatctactgataaaactggaagcaaaaaatctgatagaaagaataagaataagatcaagatcaaggattatatggaacacgattattataaaataacaatagttcctggttcctcttccacgtctactagctcgtggtattatactcatgcctagtaatagtctctttgcgttgacggaaagcagactagaaataacaggctaaaatgttcagacaccataatagttcccaacccagataataacagagtaccatcaacacattcctttaaactcaatcccaaacccaaaaccgttaaaatgtatccggccaattgatagtagataatgaggtgtacagcgcatgataatttacacagtaaccaaaatgaaaatactttagtaattataagaaatatagatggtaacgtcatcatcaacaatccaataatatgccggagagtaaacattgacggataaaacaaaaatgctccgcataactctatcatggcaataacacaaccaaatacttgtaagattcctaaattagtagaaaatacaacggatatcgatgtataagtgatctcgagaaataataagaataaagtaatgcccgtaaagataaacatcaacattgtttggtaatcattaaaccaattagtatgaagttgaactaatttcacagtagattttattccagtgttatcctcgcatgtataagtacctggtaagatatctttatattctataatcaatgagacatcactatccgataacgaatgaagtctagcactagtatgccatttacttaatattgtcgtcttggaagttttattataagttaaaatatcatggttatccaatttccatctaatatactttgtcggattatctatagtacacggaataatgatggtatcattacatgctgtatactctatggtctttgtagttgttataacaaccaacgtatagaggtatatcaacgatattctaactcttgacattttttatttatttaaaatgatacctttgttatttattttattctattttgctaacggtattgaatggcataagtttgaaacgagtgaagaaataatttctacttacttattagacgacgtattatacacgggtgttaatggggcggtatacacattttcaaataataaactaaacaaaactggtttaactaataataattatatcacaacatctataaaagtagaggatgcggataaggatacattagtatgcggaaccaataacggaaatcccaaatgttggaaaatagacggttcagacgacccaaaacatagaggtagaggatacgctccttatcaaaatagcaaagtaacgataatcagttacaacgaatgtgtactatctgacataaacatatcaaaagaaggaattaaacgatggagaagatttgacggaccatgtggttatgatttatacacggcggataacgtaattccaaaagatggtttacgaggagcattcgtcgataaagatggtacttatgacaaagtttacattcttttcactgatactatcggctcaaagagaattgtcaaaattccgtatatagcacaaatgtgcctaaacgacgaaggtggtccatcatcattgtctagtcatagatggtcgacgtttctcaaagtcgaattagaatgtgatatcgacggaagaagttatagacaaattattcattctagaactataaaaacagataatgatacgatactatatgtattcttcgatagtccttattccaagtccgcattatgtacctattctatgaataccattaaacaatctttttctacgtcaaaattggaaggatatacaaagcaattgccgtctccagctcctggtatatgtttaccagctggaaaagttgtttcacataccacgtttgaagtcatagaaaaatataatgtactagatgatattataaagcctttatctaaccaacctatcttcgaaggaccgtctggtgttaaatggttcgatataaaggagaaggaaaatgaacatcgggaatatagaatatacttcataaaagaaaattctatatattcgttcgatacaaaatctaaacaaactcgtagctcgcaagtcgatgcgcgactattttcagtaatggtaacttcgaaaccgttatttatagcagatatagggataggagtaggaatgccacaaatgaaaaaaatacttaaaatgtaatcttaatcgagtacaccacacgacaatgaacaaacctaagacagattatgctggttatgcttgctgcgtaatatgcggtctaattgtcggaattatttttacagcgacactattaaaagttgtagaacgtaaattagttcatacaccatcaatagataaaacgataaaagatgcatatattagagaagattgtcctactgactggataagctataataataaatgtatccatttatctactgatcgaaaaacctgggaggaaggacgtaatacatgcaaagctctaaatccaaattcggatctaattaagatagagactccaaacgagttaagttttttaagaagccttagacgaggctattgggtaggagaatccgaaatattaaaccagacaaccccatataattttatagctaaaaatgccacgaagaatggaaatatatttgtagcacaacgaatactcccaaactgcattcgtgttacactatataacaattacactacatttttatcataccactacttcggttagatgttttagaaaaaaataaatatcgccgtaccgttcttgtttttataaaaataacaattaacaattatcaaattttttctttaatattttacgtggttgaccattcttggtggtaaaataatctcttagtgttggaatggaatgctgtttaatgtttccgcactcatcgtatattttgacgtatgcagtcacatcgtttacgcaatagtcagactgtagttctatcatgcttcctacatcagaaggaggaacagttttaaagtctcttggttttaatctattgccattagttttcatgaaatcctttgttttatccacttcacattttaaataaatgtccactatacattcttctgttaattttactagatcgtcatgggtcatagaatttataggttccgtagtccatggatccaaactagcaaacttcgcgtatacggtatcgcgattagtgtatacaccaacagtatgaaaattaagaaaacagtttaatagatcaacagaaatatttaatcctccgtttgatacagatgcgccatatttatggatttcggattcacacgttgtttgtctgaggggttcgtctagcgttgcttctacgtaaacttcgattcccatatattctttattgtcagaatcgcataccgatttatcatcatacactgtttgaaaactaaatggtatacacatcaaaataataaataataacgagtacattctgcaatattgttatcgtaattggaaaaatagtgttcgagtgagttggattatgtgagtattggattgtatattttattttatattttatattttatattttgtaataagaataaaatgctaatgtcaagtttattccaatagatgtcttattaaaaaacatatataataaataacaatggctgaatggcataaaattatcgaggatatctcaaaaaataataagttcgaggatgccgccatcgttgattacaagactacaaagaatgttctagctgctattcctaacagaacatttgccaagattaatccgggtgaaattattcctctcatcactaatcgtaatattctaaaacctcttattggtcagaaatattgtattgtatatactaactctctaatggatgagaacacgtatgctatggagttgcttactgggtacgcccctgtatctccgatcgttatagcgagaactcataccgcacttatatttttgatgggtaagccaacaacatccagacgtgacgtgtatagaacgtgtagagatcacgctacccgtgtacgtgcaactggtaattaaaataaaaagtaatattcatatgtagtgtcaattttaaatgatgatgatgaaatggataatatccatattgacgatgtcaataatgccggtattggcatacagctcatcgatttttagatttcattcagaggatgtggaattatgttatgggcatttgtattttgataggatctataatgtagtaaatataaaatataatccgcatattccatatagatataattttattaatcgcacgttaaccgtagatgaactagacgataatgtcttttttacacatggttattttttaaaacacaaatatggttcacttaatcctagtttgattgtctcattatcaggaaacttaaaatataatgatatacaatgctcagtaaatgtatcgtgtctcattaaaaatttggcaacgagtacatctactatattaacatctaaacataagacttattctctacatcggtccacgtgtattactataataggatacgattctattatatggtataaagatataaatgacaagtataatgacatctatgattttactgcaatatgtatgctaatagcgtctacattgatagtgaccatatacgtgtttaaaaaaataaaaatgaactcttaattatgctatgctattagaaatggataaaatcaaaattacggttgattcaaaaattggtaatgttgttaccatatcgtataacttggaaaagataactattgatgttacaccaaaaaagaaaaggatgtattattagcgcaatcagttgctgtcgaagaggcaaaagatgtcaaggtagaagaaaaaaatattatcgatattgaagatgacgatgatatggatgtagaaagcgcgtaatactatctataaacataagtatataataaatactttttatttacggtactcttgtagtggtgataccctactcgattatttttttaaaaaaaaaatacttattctgattcttctaaccatttccgtgttcgtttgaatgccacatcgacgtcaaagataggggagtagttgaaatctagttctgcattgttggtacgcacctcaaatgtagtgttggatatcttcaacgtatagttgttgagtagtgatggttttctaaatagaattctcttcatatcattcttgcacgcgtacatttttagcatccatcttggaatcctagatccttgttctattcccaatggtttcatcaatagaagattaaacatatcgtacgaacacgatggagagtaatcgtagcaaaagtaagcatttcctttaatcttagatcccggatactggatatattttgcagccaacacgtgcatccatgcagcatttcctacatatacccggctatgtaccgcgttatcatcgactgtacgatacataatgttaccgtgttgcttacattgctcgtaaaagactttcgtcaatttgtctccttctccgtaaattccagtgggtcttaggcaacaagtatacaattttgctccattcatgattacggaattattggctttcataaccagttgctcggccatacgtttactttttgcgtatacatgtcctggtgatatatcataaagggtatgctcatggccgatgaatggatcaccgtgtttattgggtcctattgcttccatgctactagtatagatcaaatacttgattcctaggtccacacaagctgccaatatagtctgtgttccataatagtttactttcatgatttcattatcggtgtattttccaaatacatccactagagcagccgtatgaataatcagatttaccccatctagcgcttctctcaccttatcaaagtcgtttatatcacattgtatatagtttataaccttaactttcgaggttattggttgtggatcttctacaatatctatgactctgatttcttgaacatcatctgcactaattaacagttttactatatacctgcctagaaatccggcaccaccagtaaccgcgtacacggccattgctgccactcataatatcagactacttattctattttactaaataatggctgtttgtataatagaccacgataatatcagaggagttatttactttgaaccagtccatggaaaagataaagttttaggatcagttattggattaaaatccggaacgtatagtttgataattcatcgttacggagatattagtcaaggatgtgattccataggcagtccagaaatatttatcggtaacatctttgtaaacagatatggtgtagcatatgtttatttagatacagatgtaaatatatttacaattattggaaaggcgttatctatttcaaaaaatgatcagagattagcgtgtgaagttattggtatttcttacataaatgaaaagataatacattttcttacaattaacgagaatggcgtttgatatatcagttaatgcgtctaaaacaataaatgcattagtttacttttctactcagcaaaataaattagtcatacgtaatgaagttaatgatacacactacactgtcgaatttgatagggacaaagtagttgacacgtttatttcatataatagacataatgacaccatagagataagaggggtgcttccagaggaaactaatattggttgcgcggttaatacgccggttagtatgacttacttgtataataagtatagttttaaactgattttagcagaatatataagacacagaaatactatatccggcaatatttattcggcattgatgacactagatgatttggctattaaacagtatggagacattgatctattatttaatgagaaacttaaagtagactccgattcgggactatttgactttgtcaactttgtaaaggatatgatatgttgtgattctagaatagtagtagctctatctagtctagtatctaaacattgggaattgacaaataaaaagtataggtgtatggcattagcgaacatatatctgatagtattccaatatctgagctatctagactacgatacaatctatgtaagtatctacgcgggcacactgagagcatagaggatgaatttgattattttgaagacgatgattcgtctacatgttctgccgtaaccgacagggaaacggatgtataattttttttatagcgtgaaggatatgataaaaaatataattgttgtatttatcccattccaatcaccttatatgattctgtaaaaaaattatactgtaacacaataaaggagtcttatagatgtatagaggtcagatactggtttgataaactgtttattccacataagtatgtttgactttatggttagacccgcatactttaacaaatcactgaaaattggagttaggtattgacctctcagaatcagttgccgttctggaacattaaatgtattttttatgatatactccaacgcatttatgtgggcatacaacaagtcattactaatggagtattccaagagttttagttgtctagtatttaacaagagaagagatttcaacagactgtttatgaactcgaatgccgcctcattgtcgcttatattgatgatgtcgaattctcccaatatcatcaccgatgagtagctcatcttgttatcgggatccaagttttctaaagatgtcattaaaccctcgatcatgaatggatttatcatcatcgtttttatgttggacatgagcttagtccgtttgtccacatctatagacgacgatttctgaattatttcatatatccctctctttaactccaggaacttgtcaggatggtctactttaatatgttctcgtctaagagatgaaaatctttggatggttgcacgcgacttttctctaaaggatgacgttgcccaagatcctctcttaaatgaatccatcttatccttggacaagatggacagtctattttccttagatggtttaatatttttgttacccatgatctataaaggtagacctaatcgtctcggatgaccatatatttattttcagttttattatacgcataaattgtaaaaaatatgttaggtttacgaaaatgtctcgtggggcattaatcgtttttgaaggattggacaaatctggaaaaacaacacaatgtatgaacatcatggaatctataccggcaaacacgataaaatatcttaactttcctcagagatccactgtcactggaaagatgatagatgactatctaactcgtaaaaaaacctataatgatcatatagttaatctattattttgtgcaaatagatgggagtttgcatcttttatacaagaacaactagaacagggaattactttaatagttgatagatacgcattttctggagtagcgtatgccgccgctaaaggcgcgtcaatgactctcagtaagagttatgaatctggattgcctaaacccgacttagttatattcttggaatctggtagcaaagaaattaatagaaacgtcggcgaggaaatttatgaagatgttacattccaacaaaaggtattacaagaatataaaaaaatgattgaagaaggagatattcattggcaaattatttcttctgaattcgaggaagatgtaaagaaggagttgattaagaatatagttatagaggctatacacacggttactggaccagtggggcaactgtggatgtaatagtgaaattacattttttataaatagatgttagtacagtgttataaatggatgaagcatattactctggcaacttggaatcagtactcggatacgtgtccgatatgcataccgaactcgcatcaatatctcaattagttattgccaagatagaaactatagataatgatatattaaacaaggacattgtaaattttatcatgtgtagatcaaacttggataatccatttatctctttcctagatactgtatatactattatagatcaagagaactatcagactgagttgattaattcattagacgacaatgaaattatcgattgtatagttaataagtttatgagcttttataaggataacctagaaaatatagtagatgctatcatcactctaaaatatataatgaataatccagattttaaaactacgtatgccgaagtactcggttccagaatagccgatatagatattaaacaagtgatacgtaagaatatactacaattgtctaatgatatccgcgaacgatatttgtgaaaaatattaaaaaaaaatactttttttattaaatgacgtcgcttcgcgaatttagaaaattatgctgtgatatatatcacgcatcaggatataaagaaaaatctaaattaattagagactttataacagatagggatgataaatatttgatcattaagctattgcttcccggattagacgatagaatttataacatgaacgataaacaaattataaaattatatagtataatatttaaacaatctcaggaagatatgctacaagatttaggatacggatatataggagacactattaggactttcttcaaagaaaacacagaaatccgtccaagagataaaagcattttaactttagaagacgtggatagtttcttaactacgttatcatccgtaactaaagaatcgcatcaaataaaattattgactgatatcgcatccgtttgtacatgtaatgatttaaaatgtgtagtcatgcttattgataaagatctaaaaattaaagcgggtcctcggtacgtacttaacgctattagtcctaatgcctatgatgtgtttagaaaatctaataacttgaaagagataatagaaaattcatctaaacaaaatctagactctatatctatttctgttatgactccaattaatcccatgttagcggaatcgtgtgattctgtcaataaggcgtttaaaaaatttccatcaggaatgtttgcggaagtcaaatacgatggtgaaagagtacaagttcataaaaataataacgagtttgccttctttagtagaaacatgaaaccagtactctctcataaagtggattatctcaaagaatacataccgaaagcatttaaaaaagctacgtctatcgtattggattctgaaattgttcttgtagacgaacataatgtaccgctcccgtttggaagtttaggtatacacaaaaagaaagaatataaaaactctaacatgtgtttgttcgtgtttgactgtttgtactttgatggattcgatatgacggacattccattgtacgaacgaagatcttttctcaaagatgttatggttgaaatacccaatagaatagtattctcagagttgacgaatattagtaacgagtctcagttaactgacgtattggatgatgcactaacgagaaaattagaaggattggtcttaaaagatattaatggagtatacgaaccgggaaagagaagatggttaaaaataaagcgagactatttgaacgagggttccatggcagattctgccgatttagtagtactaggtgcctactatggtaaaggagcaaagggtggtatcatggcagtctttctaatgggttgttacgacgatgaatccggtaaatggaagacggtaactaaatgttccggtcacgatgataatacgttaagggttttgcaagaccaattaacgatgattaaaattaacaaggatcccaaaaaaattccagagtggttagtagttaataaaatctatattcccgattttgtagtagaggatccgaaacaatctcagatatgggaaatttcaggagcagagtttacatcttccaagtcccataccgcaaatggaatatccattagatttcctagatttactaggataagagaggataaaacgtggaaagaatctactcatctaaacgatttagtaaacttgactaaatcttaatagttacatacaaactgaaaattaaaataacaccatttagttggtggtcgccatggatggtgttattgtatactgtctaaacgcgttagtaaaacatggcgaggaaataaatcatataaaaaatgatttcatgattaaaccatgttgtgaaagagtttgtgaaaaagttaagaacgttcacattggcggacaatctaaaaacaatacagtgattgcagatttgccatatatggataatgctgtatcggatgtatgcaattcactgtataaaaagaatgtatcaagaatatccagatttgctaatttgataaagatagatgacgatgacaagactcctactggtgtatataattattttaaacctaaagatgttattcctgttatcatatctataggaaaggataaagatgtctgtgaactattaatctcatcagacatatcgtgtgcatgcgtggagttaaattcatataaagtagccattcttcccatggatgtttccttttttaccaaaggaaatgcatcattgattattctcctgtttgatttctctatcgatgcagcacctctcttaagaagtgtaaccgataataatgttattatatctagacaccagcgtctacatgacgagcttccgagttccaattggttcaagttttacataagtataaagtccgactattgttctatattatatatggttgttgatggatctgtgatgcatgcgatagctgataatagaactcacgcaattattagcaaaaatatattagacaatactacgattaacgatgagtgtagatgctgttattttgaaccacagattaggattcttgatagagatgagatgctcaatggatcatcgtgtgatatgaacagacattgtattatgatgaatttacctgatgtaggcgaatttggatctagtatgttggggaaatatgaacctgacatgattaagattgctctttcggtggctggtaatttaataagaaatcgagactacattcccgggagacgaggatatagctactacgtttacggtatagcctctagataatttttttaagcacgaaataaaaaacataattttaaaccaatctatttcatactattttgtgtgatcaccatggacataaagatagatattagtatttctggtgataaatttacggtgactactaggagggaaaatgaagaaagaaaaaaatatctacctctccaaaaagaaaaaactactgatgttatcaaacctgattatcttgagtacgatgacttgttagatagagatgagatgtctactattctagaggaatattttatgtacagaggtctattaggcctcagaataaaatatggacgactctttaacgaaattaaaaaattcgacaatgatgcggaagaacaattcggtactatagaagaactcaagcagaaacttagattaaattctgaagagggagcagataactttatagattatataaaggtacaaaaacaggatatcgtcaaacttactgtatacgattgcatatctatgataggattgtgtgcatgcgtggtagatgtttggagaaatgagaaactgttttctagatggaaatattgtttacgagctattaaactgtttattaatgatcacatgcttgataagataaaatctatactgcagaatagactagtatatgtggaaatgtcatagaaagttaaaagttaatgagagcaaaaatatataaggttgtattccatatttgttattttttctgtaatagttaaaaaaatacattcgatggtctatctatcagattattatgtgttataaggtactttttctcataataaactagagtatgagtaagatagtgtttttcaaaacatataaatctaaaattgatggatgagatatacagctattaatttcgaaaatatattttaatctgataactttaaacatggatttttgatggtggtttaacgttttaaaaaaagattttgttattgtagtatatgataatattaaaagatggatataaagaatttgctgactgcatgtactattttttacattactacattggctacggcagatatacctactccgccaccaacgggtcatgtgacaagggagaatatcttgataagaggcataatcaatgttgtaatcggtgtccacctggagaatttgccaaggttagatgtaatggtaacgataacacaaaatgtgaacgctgcccacctcatacatataccacaatcccaattattctaatggatgtcatcaatgtagaaaatgcccaacaggatcatttgataaggtaaagtgtaccggaacacagaacagtaaatgttcgtgtcttcctggttggtattgcgctactgattcttcacagactgaagattgttgaaattgtataccaaaaaggagatgtccatgcggatactttggtggaatagatgaacaaggaaatcctatttgtaaatcgtgttgtgttggtgaatattgcgactacctacgtaattatagacttgatccatttcctccatgcaaactatctaaatgtaattaattatgattttgatgataatgttaccatacattatatcgctacttggttagtgtattattcagtatgaagacctattaataattacttatcttttgacgatcttgttataattataatataaaaatacttatggcatagtaactcataattgctgacgcgataaattcgtaataatctgttttgttcaaaggaatctacaggcataaaaataaaaatataatttataatatactcttacaacgccatcatgaataacagcagtgaattgattgctgttattaatggatttagaaatagtggacgattttgtgatattaatatagttattaatgatgaaaggataaacgctcataaactcatcctatctggagcctccgaatatttttccattctgttttccaataattttatcgattctaatgaatacgaagttaatctaagtcatttagattatcaaagtgttaacgatttgatcgattacatttatgggatacctttgagcctaactaacgataacgtgaaatatattctttcaaccgctgattttttacaaattggatctgccattacggagtgtgaaaattacatacttaaaaatctttgttctaaaaactgtatcgatttctacatatacgctgataaatataataacaagaaaatagaatcagcgtcgtttaacacaatattacaaaatattttgagactcatcaacgatgaaaactttaaatacttaacagaggaatcaatgataaaaattttaagcgatgatatgttaaatataaaaaatgaggatttcgccccactaattctcattaaatggttagagagtactcaacaatcatgcaccgtcgagttacttaaatgcctcagaatatcattgctttccccacaagttataaaatcactttatagtcatcgactggttagttcaatctacgaatgtataacattcttaaacaatatagcattcttggatgaatcatttcctagataccatagcatcgagttgatatctatcggtataagtaattcgcgtgataaaatttccataaactgctacaatcataaaaaaaatacatgggaaatgatatcttcacgtagatataggtgtagtttcgcagtggccgtcctggataatattatttatatgatgggtggatatgatcagtccccgtatagaagttcaaaggttatagcgtacaatacatgtacaaattcttggatatatgatataccagagctaaaatatcctcgttctaattgtgggggactggctgatgacgaatacatttattgtataggcggcatacgcgatcaggattcatcgttgacatctagtattgataaatggaagccatcaaaaccatattggcagaagtatgctaaaatgcgcgaaccaaaatgtgatatgggggttgcgatgttaaacggattaatatatgttataggtggaatcgttaaaggtgacacgtgtaccgacgcactagagagtttatcagaagatggatggatgaagcatcaacgtcttccaataaaaatgtccaatatgtcgacgattgttcatgatggcaagatttatatatctggaggttacaacaatagtagtgtagttaatgtaatatcgaatctagtccttagctataatccgatatatgatgaatggaccaaattatcatcattaaacattcctagaattaatcccgctctatggtcagcgcataataaattatatgtaggaggaggaatatctgatgatgttcgaactaatacatctgaaacatacgataaagaaaaagattgttggacattggataatggtcacgtgttaccacgcaattatataatgtataaatgcgaaccgattaaacataaatatccattggaaaaaacacagtacacgaatgattttctaaagtatttggaaagttttataggtagttgatagaacaaaatacataattttgtaaaaataaatcactttttatactaatatgacacgattaccaatacttttgttactaatatcattagtatacgctacaccttttcctcagacatctaaaaaaataggtgatgatgcaactctatcatgtaatcgaaataatacaaatgactacgttgttatgagtgcttggtataaggagcccaattccattattcttttagctgctaaaagcgacgtcttgtattttgataattataccaaggataaaatatcttacgactctccatacgatgatctagttacaactatcacaattaaatcattgactgctagagatgccggtacttatgtatgtgcattctttatgacatcgcctacaaatgacactgataaagtagattatgaagaatactccacagagttgattgtaaatacagatagtgaatcgactatagacataatactatctggatctacacattcaccagaaactagttctgagaaacctgattatatagataattctaattgctcgtcggtattcgaaatcgcgactccggaaccaattactgataatgtagaagatcatacagacaccgtcacatacactagtgatagcattaatacagtaagtgcaacatctggagaatccacaacagacgagactccggaaccaattactgataaagaagaagatcatacagtcacagacactgtctcatacactacagtaagtacatcatctggaattgtcactactaaatcaaccaccgatgatgcggatctttatgatacgtacaatgataatgatacagtaccatcaactactgtaggtagtagtacaacctctattagtaattataaaaccaaggactttgtagaaatatttggtattaccgcattaattatattgtcggccgtggcaatattctgtattacgtattatatatgtaataaacgttcacgtaaatacaaaacagagaacaaagtctagatttttgacttacataaatgtctgggatagtaaaatctatcatattgagcggaccatctggttcaggaaagacagccatagccaaaagactatgggaatatatttggatttgtggtgtcccataccactagatttcctcgtcctatggaacgagaaggtgtcgattaccattacgttaacagagaggccatctggaagggaatagccgccggaaactttctagaacatactgagtttttaggaaatatttacggaacttctaaaactgctgtgaatacagcggctattaataatcgtatttgtgtgatggatttaaacatcgacggtgttagaagttttaaaaatacttacctaatgccttactcggtgtatataagacctacctctcttaaaatggttgagaccaagcttcgttgtagaaacactgaagctaacgatgagattcatcgtcgcgtgatattggcaaaaacggatatggatgaggccaacgaagcaggtctattcgacactattattattgaagatgatgtgaatttagcatatagtaagttaattcagatactacaggaccgtattagaatgtattttaacactaattaaagacttaagacttaaaacttgataattaataatataactcgtttttatatgtggctatttcaacgtctaatgtattagttaaatattaaaacttaccacgtaaaacttaaaatttaaaatgatatttcattgacagatagatcacacattatgaactttcaaggacttgtgttaactgacaattgcaaaaatcaatgggtcgttggaccattaataggaaaaggtggatttggtagtatttatactactaatgacaataattatgtagtaaaaatagagcccaaagctaacggatcattatttaccgaacaggcattttatactagagtacttaaaccatccgttatcgaagaatggaaaaaatctcacaatataaagcacgtaggtcttatcacgtgcaaggcatttggtctatacaaatccattaatgtggaatatagattcttggtaattaatagattaggtgtagatctagatgcggtgatcagagccaataataatagattaccaaaaaggtcggtgatgttgatcggaatcgaaatcttaaataccatacaatttatgcacgagcaaggatattctcacggagatattaaagcgagtaatatagtcttggatcaaatagataagaataaattatatctagtggattacggattggtttctaaattcatgtctaatggcgaacatgttccatttataagaaatccaaataaaatggataacggtactctagaatttacacctatagattcgcataaaggatacgttgtatctagacgtggagatctagaaacacttggatattgtatgattagatggttgggaggtatcttgccatggactaagatatctgaaacaaagaattgtgcattagtaagtgccacaaaacagaaatatgttaacaatactgcgactttgttaatgaccagtttgcaatatgcacctagagaattgctgcaatatattaccatggtaaactctttgacatattttgaggaacccaattacgacgagtttcggcacatattaatgcagggtgtatattattaagtgtggtgtttggtcgatgtaaaatttttgtcgataaaaattaaaaaataacttaatttattattgatctcgtgtgtacaaccgaaatcatggcgatgttttacgcacacgctctcggtgggtacgacgagaatcttcatgcctttcctggaatatcatcgactgttgccaatgatgtcaggaaatattctgttgtgtcagtttataataacaagtatgacattgtaaaagacaaatatatgtggtgttacagtcaggtgaacaagagatatattggagcactgctgcctatgtttgagtgcaatgaatatctacaaattggagatccgatccatgatcaagaaggaaatcaaatctctatcatcacatatcgccacaaaaactactatgctctaagcggaatcgggtacgagagtctagacttgtgtttggaaggagtagggattcatcatcacgtacttgaaacaggaaacgctgtatatggaaaagttcaacatgattattctactatcaaagagaaggccaaagaaatgagtacacttagtccaggacctataattgattaccacgtctggataggagattgtatctgtcaagttactgctgtggacgtacatggaaaggaaattatgagaatgagattcaaaaagggtgcggtgcttccgatcccaaatctggtaaaagttaaacttggggagaatgatacagaaaatctttcttctactatatcggcggcaccatcgaggtaaccacctctctggaagacagcgtgaataatgtactcatgaaacgtttggaaactatacgccatatgtggtctgttgtatatgatcattttgatattgtgaatggtaaagaatgctgttatgtgcatacgcattcatctaatcaaaatcctataccgagtactgtaaaaacaaatttgtacatgaagactatgggatcatgcattcaaatggattccatggaagctctagagtatcttagcgaactgaaggaatcaggtggatggagtcccagaccagaaatgcaggaatttgaatatccagatggagtggaagacactgaatcaattgagagattggtagaggagttcttcaatagatcagaacttcaggctggtaaattagtcaaatttggtaattctattaattgttaaacatacatctgtttcagctaagcaactaagaacacgtatacggcagcagcttcctttatactctcatcttttaccaacacaaagggtggatatttgttcattggagttgataataatacacacaaagtatttggattcacggtgggttacgactacctcagactggtagagaatgatatagaaaagcatatcaaaagactttgtgttgtgcatttctgtgagaagaaagaggacatcaagtacgcgtgtcgattcatcaaggtatataaacctggggatgaggctacctcgacatacgtgtgcgctatcaaagtggaaagatgctgttgtgctgtgtttgcagattggccagaatcatggtatatggatactaatggtatcaagaagtattctccagatgaatgggtgtcacatataaaattttaattaatgtaactatagagaacaaataataggttgtaatatcatatagacaataactaacaattaattagtaactgttatctcttttttaactaaccaactaactatatacctattaatacatcgtaattatagttcttaacatctattaatcattgattcgcttctttaattttttataaactaacattgttaattgaaaagggataacatgttacagaatataaattatatatggatttttttaaaaaggaaatacttgactggagtgtatatttatctcttcattatatagcacgcgtgtgttccaattcttccacatcccatataatacaggattataatctcattcgaacatacgagaaagtggataaaacaatagttgattttttatctaggttgccaaatttattccatattttagaatatggggaaaatattctacatatttattctatggatgatgctaatacgaatattataattttttttctagatagagtattaaatattaataagaacgggtcatttatacacaatctcaggttatcatcatccattaatataaaagaatatgtatatcaattagttaataatgatcatccagataataggataagactaatgcttgaaaatggacgtagaacaagacattttttgtcctatatatcagatacagttaatatctatatatgtattttaataaatcatggattttatatagatgccgaagacagttacggttgtacattattacatagatgtatatatcactataagaaatcagaatcagaatcatacaatgaattaattaagatattgttaaataatggatcagatgtagataaaaaagatacgtacggaaacacaccttttatcctattatgtaaacacgatatcaacaacgtggaattgtttgagatatgtttagagaatgctaatatagactctgtagactttaatagatatacacctcttcattatgtctcatgtcgtaataaatatgattttgtaaagttattaatttctaaaggagcaaatgttaatgcgcgtaataaattcggaactactccattttattgtggaattatacacggtatctcgcttataaaactatatttggaatcagacacagagttagaaatagataatgaacatatagttcgtcatttaataatttttgatgctgttgaatctttagattatctattatccagaggagttattgatattaactatcgtactatatacaacgaaacatctatttacgacgctgtcagttataatgcgtataatacgttggtctatctattaaacagaaatggtgattttgagacgattactactagtggatgtacatgtatttcggaagcagtcgcaaacaacaacaaaataataatggaagtactattgtctaaacgaccatctttgaaaattatgatacagtctatgatagcaattactaaaaataaacaacataatgcagatttattgaaaatgtgtataaaatatactgcgtgtatgaccgattatgatactcttatagatgtacagtcgctacagcaatataaatggtatattttaaaatgtttcgatgaaatagatatcatgaagagatgttatataaaaaataaaactgtattccaattagttttttgtatcaaagacattaatactttaatgagatacggtaaacatccttctttcgtgaagtgcactagtctcgacgtatacggaagtcgtgtacgtaatatcatagcatctattagatatcgtcagagattaattagtctattatccaagaagctggatgcgggagataaatggtcgtgttttcctaacgaaataaaatataaaatattggaaaactttaacgataacgaactgtccacatatctaaaaatcttataaacactattaaaatataaaatctaagtaggataaaatcacactacatcattgtttccttttagtgctcgacagtgtatactatttttaacactcataaataaaaatgaaaacgatttccgttgttacgttgttatgcgtactacctgctgttgtttattcaacatgtactgtacccactatgaataacgctaaattaacgtctaccgaaacatcgtttaataataaccagaaagttacgtttacatgtgatcagggatatcattcttcggatccaaatgctgtctgcgaaacagataaatggaaatacgaaaatccatgcaaaaaaatgtgcacagtttctgattacatctctgaactatataataaaccgctatacgaagtgaattccaccatgacactaagttgcaacggcgaaacaaaatattttcgttgcgaagaaaaaaatggaaatacttcttggaatgatactgttacgtgtcctaatgcggaatgtcaacctcttcaattagaacacggatcgtgtcaaccagttaaagaaaaatactcatttggggaatatatgactatcaactgtgatgttggatatgaggttattggtgcttcgtacataagttgtacagctaattcttggaatgttattccatcatgtcaacaaaaatgtgatataccgtctctatctaatggattaatttccggatctacattttctatcggtggcgttatacatcttagttgtaaaagtggttttatactaacgggatctccatcatccacatgtatcgacggtaaatggaatcccgtactcccaatatgtgtacgaactaacgaagaatttgatccagtggatgatggtcccgacgatgagacagatttgagcaaactctcgaaagacgttgtacaatatgaacaagaaatagaatcgttagaagcaacttatcatataatcatagtggcgttaacaattatgggcgtcatatttttaatctccgttatagtattagtttgttcctgtgacaaaaataatgaccaatataagttccataaattgctaccgtaaatataaatccgttaaaataattaataattaataattaataattaataacgaacaagtatcaaaagattaaagacttatagctagaatcaattgagatgtcttcttcagtggatgttgatatctacgatgccgttagagcatttttactcaggcactattataacaagagatttattgtgtatggaagaagtaacgccatattacataatatatacaggctatttacaagatgcgccgttataccgttcgatgatatagtacgtactatgccaaatgaatcacgtgttaaacaatgggtgatggatacacttaatggtataatgatgaatgaacgcgatgtttctgtaagcgttggcaccggaatactattcatggaaatgtttttcgattacaataaaaatagtatcaacaatcaactaatgtatgatataattaatagcgtatctataattctagctaatgagagatatagaagcgcttttaacgacgatggtatatacatccgtagaaatatgattaacaagttgtacggatacgcatctctaactactattggcacgatcgctggaggtgtttgttattatctgttgatgcatctagttagtttgtataaataattatttcaatatactagttaaaattttaagattttaaatgtataaaaaactaataacgtttttatttgtaataggtgcattagcatcctattcgaataatgagtacactccgtttaataaactgagtgtaaaactctatatagatggagtagataatatagaaaattcatatactgatgataataatgaattggtgttaaattttaaagagtacacaatttctattattacagagtcatgcgacgtcggatttgattccatagatatagatgttataaacgactataaaattattgatatgtataccattgactcgtctactattcaacgcagaggtcacacgtgtagaatatctaccaaattatcatgccattatgataagtacccttatattcacaaatatgatggtgatgagcgacaatattctattactgcagagggaaaatgctataaaggaataaaatatgaaataagtatgatcaacgatgatactctattgagaaaacatactcttaaaattggatctacttatatatttgatcgtcatggacatagtaatacatattattcaaaatatgatttttaaaaatttaaaatatattatcacttcagtgacagtagtcaaataacaaacaacaccatgagatatattataattctcgcagttttgttcattaatagtatacacgctaaaataactagttataagtttgaatccgtcaattttgattccaaaattgaatggactggggatggtctatacaatatatcccttaaaaattatggcatcaagacgtggcaaacaatgtatacaaatgtaccagaaggaacatacgacatatccgcatttccaaagaatgatttcgtatctttctgggttaaatttgaacaaggcgattataaagtggaagagtattgtacgggactatgcgtcgaagtaaaaattggaccaccgactgtaacattgactgaatacgacgaccatatcaatttgtacatcgagcatccgtatgctactagaggtagcaaaaagattcctatttacaaacgcggtgacatgtgtgatatctacttgttgtatacggctaacttcacattcggagattctgaagaaccagtaacatatgatatcgatgactacgattgcacgtctacaggttgcagcatagactttgccacaacagaaaaagtgtgcgtgacagcacagggagccacagaagggtttctcgaaaaaattactccatggagttcggaagtatgtctgacacctaaaaagaatgtatatacatgtgcaattagatccaaagaagatgttcccaatttcaaggacaaaatggccagagttatcaagagaaaatttaataaacagtctcaatcttatttaactaaatttctcggtagcacatcaaatgatgttaccacttttcttagcatgcttaacttgactaaatattcataactaatttttattaatgatacaaaaacgaaataaaactgcatattatacactggttaacgcccttataggctctaaccattttcaagatgaggtccctgattatagtccttctgttcccctctatcatctactccatgtctattagacgatgtgagaagactgaagaggaaacatggggattgaaaatagggttgtgtataattgccaaagatttctatcccgaaagaactgattgcagtgttcatctcccaactgcaagtgaaggattgataactgaaggcaatggattcagggatatacgaaacaccgataaattataaaaaaagcaatgtgtccgctgtttccgttaataatactattttcgtaactggcggattattcataaataactctaatagcacgatcgtggttaacaatatggaaaaacttgacatttataaagacaaacaatggtcgattatagaaatgcctatggctagggtatatcacggcatcgactcgacatttggaatgttatattttgccggaggtctatccgttaccgaacaatatggtaatttagagaaaaacaacgagatatcttgttacaatcctagaacgaataagtggtttgatatttcatatactatttataagatatccatatcatcattgtgtaaactaaataacgtcttctatgtatttagtaaggacattggatatgtggaaaagtatgatggtgcatggaagttagtacatgatcgtctccccgctataaaggcattatcaacttctccttattgattgaaaatgaaaatataaatagtttttatgtatagcagtattaccctatagttttattgcttactactaacatggatacagatacagatacagatacagatacagatacagatacagatacagatacagatgttacaaatgtagaagatatcataaatgaaatagatagagagaaagaagaaatactaaaaaatgtagaaattgaaaataataaaaacattaacaagaatcatccaagtggatatattagagaagcactcgttattaatacaagtagtaatagtgattccattgataaagaagttatagaatgtatcagtcacgatgtaggaatatagatcatatctactaatttttataatcaatacaaaacataaaaaacaactcgttattacatagcaggcatggaatccttcaagtattgttttgataacgatggcaagaaatggattatcggaaatactttatattctggtaattcaatactctataaggtcagaaaaaatttcactagttcgttctacaattacgtaatgaagatagatcacaaatcacacaagccattgttgtctgaaatacgattctatatatctgtattggatcctttgactatcgacaactggacacgggaacgtggtataaagtatttggctattccagatctgtatggaattggagaaaccgatgattatatgttcttcgttataaagaatttgggaagagtattcgccccaaaggatactgaatcagtcttcgaagcatgtgtcactatgataaacacgttagagtttatacactctcgaggatttacccatggaaaaatagaaccgaggaatatactgattagaaataaacgtctttcactaattgactattctagaactaacaaactatacaagagtggaaactcacatatagattacaacgaggacatgataacttcaggaaatatcaattatatgtgtgtagacaatcatcttggagcaacagtttcaagacgaggagatttagaaatgttgggatattgcatgatagaatggttcggtggcaaacttccatggaaaaacgaaagtagtataaaagtaataaaacaaaaaaaagaatataaaaaatttatagctactttctttgaggactgttttcctgaaggaaatgaacctctggaattagttagatatatagaattagtatacacgttagattattctcaaactcctaattatgacagactacgtagactgtttatacaagattgaaattatattctttttttatagagtgtggtagtgttacggatatctaatattaatattagactatctctatcgcgctacacgaccaatatcgattactatgaatatcttctatgaaaggagagaatgtattcatttctccagcgtcaatctcgtcagtattgacaatactgtattatggagctaatggatccactgctgaacagctatcaaaatatgtagaaacggaggagaacacggataaggttagcgctcagaatatctcattcaaatccataaataaagtatatgggcgatattctgccgtgtttaaagatttctttttgggaaaaattggcgataagtttcaaactgttgacttcactgattgtcgcactatagatgcaatcaacaagtgtgtagatatctttactgaggggaaaatcaatccactattggatgaaccattgtctcctagcaattagtgccgtatactttaaagcaaaatggttgacgccattcgaaaaggaatttaccagtgattatcccttttacgtatcaccaacggaaatggtagatgtaagtatgatgtctatgtacggcgagctatttaatcacgcatctgtaaaggaatcattcggcaacttttcaatcatagaactgccatatgttggagatactagtatgatggtcattcttccagacaagattgatggattagaatccatagaacaaaatctaacagatacaaattttaagaaatggtgtaactctctggatgctatgtttatagatgttcacattcccaagtttaaggtaacaggctcgtataatctggtggatactctagtaaagtcaggactgacagaggtgttcggttcaactggagattatagcaatatgtgtaatttagatgtgagtgtcgacgctatgatccacaaaacgtatatagatgtcaatgaagagtatacagaagcagctgcagcaacttgtgcactggtgtcagactgtgcatcaacaattacaaatgagttctgtgtagatcatccgttcatctatgtgattaggcatgttgatggaaaaattcttttcgttggtagatattgctctccaacaactaattgttaaccattttttttaaaaaaaatagaaaaaacatgtggtattagtgcaggtcgttgttcttccaattgcaattggtaagatgacagccaactttagtacccacgtcttttcaccacagcactgtggatgtgacagactgaccagtattgatgacgtcaaacaatgtttgactgaatatatttattggtcgtcctatgcataccgcaacaggcaatgcgctggacagttgtattccacactcctctcttttagagatgatgcggaattagtgttcatcgacattcgcgagctggtaaaaaatatgccgtgggatgatgtcaaagattgtacagaaatcatccgttgttatataccggatgagcaaaaaaccatcagagagatttcggccatcatcggactttgtgcatatgctgctacttactggggaggtgaagaccatcccactagtaacagtctgaacgcattgtttgtgatgcttgagatgctcaattacgtggattataacatcatattccggcgtatgaattgatgagttgtacatcttgacattttcttctttcttctcttctccctttcccagaaacaaacttttttacccactataaaataaaatgagtatactacctgttatatttcttcctatatttttttattcttcattcgttcagacttttaacgcgtctgaatgtatcgacaaagggtaatattttgcatcattcatggagttagaaaacgagccagtaatcttaccatgtcctcaaataaatacgctatcatccggatataatatattagatattttatgggaaaaacgaggagcggataatgatagaattataccgatagataatggtagcaatatgctaattctgaacccgacacaatcagactctggtatttatatatgcattaccacgaacgaaacctactgtgacatgatgtcgttaaatttgacaatcgtgtctgtctcagaatcaaatatagattttatctcgtatccacaaatagtaaatgagagatctactggcgaaatggtatgtcccaatattaatgcatttattgctagtaacgtaaacgcagatattatatggagcggacatcgacgccttagaaataagagacttaaacaacggacacctggaattattaccatagaagatgttagaaaaaatgatgctggttattatacatgtgttttagaatatatatacggtggcaaaacatataacgtaaccagaattgtaaaattagaggtacgggataaaataatacatcctactatgcaattaccagaaggtgttgtaacttcaataggtagtaatttgactattgcgtgtagagtatcgttgagacctcccacaacggatgcagacgtcttttggataagtaatggtatgtattacgaagaagatgatggggacggagacggtagaataagtgtagcaaataaaatctatatgaccgataagagacgtgttattacatcccggttaaacattaatcctgtcaaggaagaagatgctacaacgtttacgtgtatggcgtttactattcctagcatcagcaaaacagttactgttagtataacgtgaatgtatgttgttacatttccatgtcaattgagtttataagaatttttatacattatcttccaacaagcaattgacgaacgtattgctatgattaactcccacgatactatgcatattattaatcattaacttgcagactatacctagagctattttgacatactcgtgttcttgtgtaattgcagtatctatattattaaagtacgtaaatctagctatagttttattatttaattttagataatataccgtctccttatttttaaaaattgccacatcctttattaaatcatgaatgggaatttctatgtcatcgttagtatattgtgaacaacaagagcagatatctataggaaagggtggaatgcgatacattgatctatgtagttttaaaacacacgcaaactttgaagaatttatataaatcattccatcgatacatccttctatgttgacatgtatatatccaggaattcttttattaatgtcaggaaatgtataaactaaaacattgcccggaagcggagcttctaccggagttatatccgttcttaacttacaaaatgtaaccaatacctttgcatgacttgttttgttcggcaacgttagtttaaacttgacgaatggattaattacaatagcatgatccgcgcatctattaagtttttttactttaacgcccttgtatgtttttacagagactttatctaaatttctagtacttgtatgtgttataaatataacgggatatagaaccgaatcacctaccttagatacccaattacattttatcagatccagataataaacaaattttgtcgccctaactaattctatattgttatatattttacaattggttatgatatcatgtaataacttggaatctaacgcacatcgtcgtacgtttacacaattgtgatttagtgtagtatatctacacatgtatttttccgcgctatagtattctggactagtgataaaactatcgttatatctgtcttcaatgaactcatcgagatattgctctctgtcatattcatacacctgcataaactttctagacatcttacaatccgtgttattttaggatcatatttacatatttactggtataaagatgttagattagttaatgggaatcgtctataataatgaatattaaacaattatatgaggacttttaccacaaagcatcataaaaatgagtcgtcgtctgatttatgttttaaatatcaaccgcaaatcaactcataaaatacaagagaatgaaatatatacatattttagtcattgcaatatagaccatacttctacagaacttgattttgtagttaaaaactatgatctaaacagacgacaacatgtaactgggtatactgcactacactgctatttgtataataattactttacaaacgatgtactgaagatattattaaatcatgacgtaaatgtaacgatgaaaaccagtagcggacgtatgcctgtttatatattgcttactagatgttgtaatatttcacatgatgtagtgatagatatgatagacaaagataaaaaccacttatcgcatagagactattccaacctactactagagtatataaaatctcgttacatgttattgaaggaagaggatatcgatgagaacatagtatcaactttattagataagggaatcgatcctaactttaaacaagacggatatacagcgttacattattattatttgtgtctcgcacacgtttataaaccaggtgagtgtagaaaaccgataacgataaaaaaggccaagcgaattatttctttgtttatacaacatggagctaatctaaacgcgttagataattgtggtaatacaccattccatttgtatcttagtattgaaatgtgtaataatattcatatgactaaaatgctgttgacttttaatccgaatttcaaaatatgtaataatcatggattaacgcctatactatgttatataacttccgactacatacaacacgatattcttgttatgttaatacatcactatgaaacaaatgttggagaaatgccgatagatgagcgtcgtatgatcgtattcgagtttatcaaaacatattctacacgtcctgcagattcgataacttatttgatgaataggtttaaaaatataaatatttatacccgctatgaaggaaagacattattacacgtagcatgtgaatataataatacacaagtaatagattatcttatacgtatcaacggagatataaatgcgttaaccgacaataacaaacacgctacacaactcattatagataacaaagaaaattccccatataccattaattgtttactgtatatacttagatatattgtagataagaatgtgataagatcgttggtggatcaacttccatctctacctatcttcgatataaaatcatttgagaaattcatatcctactgtatacttttagatgacacattttacgataggcacgttaagaatcgcgattctaaaacgtatcgatacgcattttcaaaatacatgtcgttcgataaatacgatggtataataactaaatgtcacgacgaaacaatgttactcaaactgtccactgttctagacactacactatatgcagttttaagatgtcataattcgagaaagttaagaagatacctcaccgagttaaaaaaatataataacgataagtcctttaaaatatattctaatattatgaatgagagataccttaatgtatattataaagatatgtacgtgtcaaaggtatatgataaactatttcctgttttcacagataaaaattgtctactaacattactaccttcagaaattatatacgaaatattatacatgctgacaattaacgatctttataatatatcgtatccacctaccaaagtatagttgtatttttctcatgcgatgtgtgtaaaaaaactgatattatataaatattttagtgccgtataataaagatgacgatgaaaatgatggtacatatatatttcgtatcattatcattattgttattgctattccacagttacgccatagacatcgaaaatgaaatcacagaattcttcaataaaatgagagatactctaccagctaaagactctaaatggttgaatccagcatgtatgttcggaggcacaatgaatgatatggccactctaggagagccattcagtgcaaagtgtcctcctattgaagacagtcttttatcgcacagatataaagactatgtggttaaatgggagaggctagaaaagaatagacggcgacaggtttctaataaacgtgttaaacatggtgatttatggatagccaactatacatctaaattcagtaaccgtaggtatttgtgcaccgtaactacaaagaatggtgactgtgttcagggtatagttagatctcatattaaaaaacctccttcatgcattccaaaaacatatgaactaggtactcatgataagtatggcatagacttatactgtggaattctttacgcaaaacattataataatataacttggtataaagataataaggaaattaatatcgacgacattaagtattcacaaacgggaaaggaattaattattcataatccagagttagaagatagcggaagatacgactgttacgttcattacgacgacgttagaatcaagaatgatatcgtagtatcaagatgtaaaatacttacggttataccgtcacaagaccacaggtttaaactaatactagatccgaaaatcaacgtaacgataggagaacctgccaatataacatgcactgctgtgtcaacgtcattattgattgacgatgtactgattgaatgggaaaatccatccggatggcttataggattcgattttgatgtatactctgttttaactagtagaggcggtatcaccgaggcgaccttgtactttgaaaatgttactgaagaatatataggtaatacatataaatgtcgtggacacaactattattttgaaaaaacccttacaactacagtagtattggagtaaatatacaatgcatttttatatacattactgaattattattactgaattattattactgaattattattaattatatcgtatttgtgctatagaatggatgaagatacgcgactatctaggtatttgtatctcaccgatagagaacatataaatgtagactctattaaacagttgtgtaaaatatcagatcctaatgcatgttatagatgtggatgtacggctttacatgagtacttttataattatagatcagtcaacggaaaatacaagtatagatacaacggttactatcaatattattcatctagcgattatgaaaattataatgaatattattatgatgattatgatagaactggtatgaacagcgagagcgatagtgagagtgataatatatcaatcaaaacagaatatgagaatgaatatgaattctatgatgaaacacaagatcaaagtacacaacacaatgacttataaaaatactaaaactggagagactgattacacgtacctctctaatgggggttgcctgcatactatcgtaatggggtcgatggttgattattgattagtatattccttattcacacaaaaagaacatttttataaacatgaaaccactgtctaaatgtaattatgatcttgatttatagatgaagatcagcctttagaggattttaaccagtatgtttaatatgaaaaaaataaacataacatattttgagattaagcgctattgtgcttaattattttgctctataaactgaatatatagccacaattattgacgggcttgtttatgaccggcaatcatgaatttacagaaattatctctggctatatatcttactgcgacatgttcgtggtgttatgaaacatgcataagaaaaactgcgttgtatcatgacattcaattggagcatgtagaagacaataaagatagtgtagcgtcgctaccgtacaagtagtcaatcaaagagaacgtagtagattgttggctacatttaattggacagatatagctgagggtgttagaaatgagttcattaaaatatgtgatatcaacggaacatatttatataattatactattgctgttagtataattattgattccacggaagaactaccaacagttactccaattacaacaacatatgaaccttctacatataattatactatcgatgatagcactgttattactactgaagaactacaagtgactcctcatatggatctccatcgatgatacatgtattaaaatactttccgaataagtcttttaaatattgtattaattatgaaaaactatgctatgcgagtatgatgcaaagatgtttaatgatacgatactagattttatctctagcgagagatgtcgttagaatcatttatcataactacgtttaataataattcatcaacgaatatcgataacatgtgtcatttatacgttaaagtctgtccgtcttctctattgtttagactgtttgtagaatgctgtgatataaacaaactagtagaaggtacgactccgttacactgttatctaatgaatgaaggatttgaatcatctgttttaaaaaacctattaaaggagtatgtcatgaatacgtttaatgttcatgacatccattacacaaatatttaactcatgatgaagttgagaatgatatgctttctgatagtatagatagctttagctaatataaaaatatattaatccactatatattctagacttgatttaaaaccgataaactactactacgtactgtataagttgttaaaaaaaggagcagaccctaattatgtagatgatagaggtaatacttttcttcattacttctgcatctatatgtccacttatgagaaaacgtcattcaataagatgcatcgtgaaaagaaatttattaaagagttggtaaaatatgaaaccgaaagtaaataatataggaaatacacctctacataactacgtatctcaatatgatatcactctcattcctcatccacaacccattaaaaaaatggaaattaaagccctctattagcataaacggctacaggtctacctttacaatggcctttccttgtgcccagttcagaccctgtcattgccacgctactaaggactccctgaataccgtggccgacgtcagacattgtctgactgaatacatcctgtgggtttctcatagatggacccatagagaaagcgcagggtctctctacaggcttctcatctctttcagaactgatgcaacggagctctttggtggtgagttgaaggattcacttccgtgggacaatatcgacaattgcgtggagatcattaaatgtttcatcagaaatgactccatgaaaaccgccgaagaacttcgtgcaatcattggactttgtactcaatcagctatcgtctctggaagagtcttcaacgataagtatatcgacatactacttatgctgcgaaagattctgaacgagaacgactatctcaccctcttggatcatatccgcactgctaaatactaaatctccttcatgctctctcactacactttttatcatcttatgaggaatgattgccttcatcatttttcgtgaaataggaataattagcaccagaatagctatggattattgtggtagagagtgcactattctatgtcgtctactggatgaagatgtgacgtacaaaaaaataaaactagagattgaaacgtgtcacaacttatcaaaacatatagatagacgaggaaacaatgcgctacattgttacgtctccaataaatgcgatacagacattaagattgttcgactgttactctctcgcggagtcgagagactttgtagaaacaacgaaggattaactccgctaggagcatacagtaagcatagatacgtaaaatctcagattgtgcatctactgatatccagctattcgaattcctctaacgaactcaagtcgaatataaatgatttcgatctgtcttcggataatatcgacttacgtctgctaaaatacctaattgtggataaacggatacgtccgtccaagaatacgaattatgcaatcaatggtctcggattggtggatatatacgtaacgacgcctaatccgagaccagaagtattgctatggcttcttaaatcagaatgttacagcaccggttacgtatttcgtacctgtatgtacaacagtgatatgtgtaagaactctcttcattactatatatcgtctcatagagaatctcaatctctatccaaggatgtaattaaatgtttgatcaataacaatgtttccatccatggcagagacgaaggaggatctttacccatccaatactactggtctttctcaaccatagatatagagattgttaaattattattaataaaggatgtggacacgtgtagagtatacgacgtcagccctatattagaggcgtattatctaaacaagcgatttagagtaaccccatataatgtagacatggaaatcgttaatcttcttattgagagacgtcatactcttgtcgacgtaatgcgtagtattacttcgtacgattccagagaatataaccactacatcatcgataacattctaaagagatttagacaacaggatgaatccatcgtacaagccatgttgataaactacttacattacggcgatatggtcgttcgatgcatgttagataacggacaacaactatcctctgcacgactactttgttaataataatctcgtcgatgtaaacgtcgtaaggtttatcgtggaaaatatggacacgcggctgtaaatcacatatctaacaatggccgtctatgtatgtacggtctgatattatcgagatttaataattgcgggtatcactgttatgaaaccatactaatagatgtatttgatatactaagcaagtacatggatgatatagatatgatcgataatgagaataaaactctactatattacgcggtcgatgtcaataatatacaatttgcaaagcggttattggaatatggagcgagtgttacaacatcacgctcgataatcaatacggccatccagaaaagcagttaccaaagagaaaacaaaacgaggatagttgatttattacttagctaccatcccactctagagactatgattgacgcatttaatagagatatacgctatctatatcctgaaccattattcgcctgtatcagatacgccttaatcctagatgatgattttccttctaaagtaagtatgatatcgccggtcatcataaggaactaaagcgctatagagtagacattaatagaatgaagaatgcctacatatcaggcgtctccatgtttgatatattatttaaacgaagcaaacgccacagactgagatacgcaaagaatccgacatcaaatggtacaaaaaagaactaacgtccatcattacagaaactgtaaagaacagtgagaggatcgactccatagtggacaacattaatacagacgataacttgatttcgaaattacccatggagatactttattactccattaaataatttatcatggagtgataatgtcctgtttcatttgtttccatgacatattacaaaatcgattccgtccaagatgataaaaacatttaccggcatcataaacacggagtttattttatatgtctcgcataaacattactaaaaaaatatattgttctgtttttctttttctttttctttttctttcgtacatctctaattatgaaaaagtaaatgatgaaatgtatgagatgggcgagatggacgagattgtgagcatcgttcgcgacagtatgtggtacatacctaacgtatttatggacgacggtaagaatgaaggtcacgtttctgtcaacaatgtttgtcatatgtattttacgttctttgatgtggatacatcgtctcatctgtttaagctagttattaaacactgcgatctgaataaacgaggtaactctccattacattgctatacgatgaatacacgatttaatccatctgtattaaagatattgttacaccacggcatgcgtaactttgatagcaaggatgaaaaaggacaccactatctgattcattcactatcaatcgataacaagatctttgatatactaacggacaccattgatgactttagtaaatcatccgatctattgctgtgttatcttagatataaattcaatgggagcttaaactactacgttctgtacaaaggatccgaccctaattgcgccgacgaggatgaactcacttctcttcattactactgtaaacacatatccacgttctacaaaagcaattattacaagttaagtcacactaagatgcgagccgagaagcgattcatctacgcgataatagattatggagcaaacattaacgcggttacacacttaccttcaacagtataccaaacatagtcctcgtgtggtgtatgctcttttatctcgaggatacgtaataatcttgattgtacacccatcatggaacgattgtgcaacaggtcatattctcataatgttactcaattggcacgaacaaaaggaagaaggacaacatctactttatctattcataaaacataatcaaggatacactctcaatatactacggtatctactagataggttcgacattcagaaagacgaatacatataccgcctttcaaaattgtaacaacaatgttgcctcatacatcggatacgacatcaaccttccgactaaagacggtattcgacttggtgtttgaaaacagaaacatcatatacaaggcggatgttgtgaatgacatcatccaccacagactgaaagtatctctacctatgattaaatcgttgttctacaagatgtcagaattctctccctacgacgattactacgtaaaaaagatactagcctactgcctattaagggacgagtcattcgcggaactacatagtaaattctgtttaaacgaggactataaaagtgtatttatgaaaaatatatcattcgataagatagattccatcatcgtgacataagtcgcctcaaagagattcgaatctccgacaccgacctgtatacggtatcacagctatcttgaagccatacattcggacagacacatttcatttcccatgtacgacgatctcatagaacagtgccatctatcgatggagcgtaaaagtaaactcgtcgacaaagcactcaataaattagagtctaccatcggtcaatctagactatcgtatttgcctccggaaattatgcgcaatatcatctaaacagtatgttgtacggaaagaaccattacaaatattatccatgatagaaagaaaatatctatatgattggagaagtaggaaacaggaacacgacaacgattactacattattaaattatgaagtccgtattatactcgtatatattgtttctctcatgtataataataaacggaagagatatagcaccgcatgcaccatccgatggaaagtgtaaagacaacgaatacaaacgccataatttgtgtccgggaacatacgcttccagattatgcgatagcaagactaacacacaatgtacgccgtgtggttcgggtaccttcacatctcgcaataatcatttacccgcttgtctaagttgtaacggaagacgcgatcgtgtaacactactcacaatagaatctgtgaatgctctcccggatattattgtcttctcaaaggatcatccggatgcaaggcatgtgtttcccaaacaaaatgtggaataggatacggagtatccggagacgtcatctgttctccgtgtggtctcggaacatattctcacaccgtctcttccgcagataaatgcgaacccgtacccagaaatacctttaactatatcgatgtggaaattaatctgtatcccgtcaacgacacgtcgtgtactcggacgaccactaccggtctcagtgaatccatctcaacgtcggaactaactattactatgaatcataaagactgtaatcccgtatttcgtgatggatacttctccgttcttaataaggtagcgacttcaggattctttacaggagaaaggtgtgcactctgaatttcgagattaaatgcaataacaaagattcttcctccaaacagttaacgaaagcaaagaatgatgacggtatcatgccgcattcggagactgtatatctagcgtcgacatctatatactatatagtaataccaatactcaagactacgaaactgatacaatctcttatcatgtgggtaatgttctcgatgtcgatagccatatgcccggtagttgcgatatacataaactgatcactaattccaaacccacccgctttttatagtaagtttttcacccataaataataaatacaataattaatttctcgtaaaagtagaaaatatattctaatttattgcatggtaaggaagtagaatcataaagaacagtactcaatcaatagcaattatgaaacaatatatcgtcctggcatgcatgtgcctgccagtcttcagcaatcatcctcatcctcctcctcgtgtacggaagaagaaaacaaacatcatatgggaatcgatgttattatcaaagtcacaaagcaagaccaaacaccgaccaatgataagatttgccaatccgtaacggaaattacagagtccgagtcagatccagatcccgaggtggaatcagaagatgattccacatcagtcgaggatgtagatcctcctaccacttattactccatcatcggtggaggtctgagaatgaactttggattcaccaaatgtcctcagattaaatccatctcagaatccgctgatggaaacacagtgaatgctagattgtccagcgtgtccccaggacaaggtaaggactctcccgcgatcactcgtgaagaagctctggctatgatcaaagactgtgaggtgtctatcgacatcagatgtagcgaagaagagaaagacagcgacatcaagacccatccagtactcgggtctaacatctctcataagaaagtgagttacgaagatatcatcggttcaacgatcgtcgatacaaaatgtgtcaagaatctagagtttagcgttcgtatcggagacatgtgcaaggaatcatctgaacttgaggtcaaggatggattcaagtatgtcgacggatcggcatctgaaggtgcaaccgatgatacttcactcatcgattcaacaaaactcaaagcgtgtgtctgaatcgataactctattcatctgaaattggatgagtagggttaatcgaacgattcaggcacaccacgaattaaaaaagtgtaccggacactatattccggtttgcaaaacaaaaatgttcttaactacattcacaaaaagttacctctcgttacttcttctttttctgtctcaatagtgtgatacgattatgacactattcctattcctattcctatttcctttcagggtatcacaaaaatattaaacctctttctgatggtctcataaaaaaagttttacaaaaatatttttattctctttctctctttgatggtctcataaaaaaagttttacaaaaatatttttattctctttctctctttgatggtctcataaaaaaagttttacaaaaatatttttattctctttctctctttgatggtctcataaaaaaagttttacaaaaatatttttattctctttctctctttgatggtctcataaaaaaagttttacaaaaatatttttattctctttctctctttgatggtctcataaaaaaagttttacaaaaatatttttattctctttctctctttgatggtctcataaaaaaagttttacaaaaatatttttattctctttctctcttcgatggtctcacaaaaaaagttttacaaaaatatttttattctctttctctctttgatggtctcataaaaaaagttttacaaaaatatttttattctctttctctctttgatggtctcataaaaaatattaaacctctttctgatggtgtcactaaaatatttttattctcattctcattttctctttctctcttcaatggagtcataaaatatttttattctctttctctcttcgatggtctcacaaaaatattaaacctctttctgatggtgtcactaaaatatttttattctcattctcattttctctttctctcttcaatggagtcataaaatatttttattctctttctctcttcgatggtctcacaaaaatattaaacctctttctgatggagtcgtaaaaaagttttatctctttctctcttcgatggtctcactaaaatattttttattctctttctgatgcatcaactatttcttaaacaataacgtccaacaacatatactcgtcgagcttatcaacatcccctatgcccatctaggttaccagacaattgtatatcataaaataatgtttataatttacacgttaaaatcatataataaaacgtagatcgtataatattttttggtatataaatgatctagtaaaatccatgtaggggatactgctcacattttttctttggtacaaaatttcacacaagtttttatacagacaaattcttgtccatatattttaaaacattgacttttgtactaagaaaaatatctagactaactatctctttctctttctctcttcgatggtctcacaaaaatattaaacctctttctgatggagtcgtaaaaaagttttatctctttctctcttcgatggtctcacaaaaatattaaacctctttctgatggagtcgtaaaaaagttttatctctttctctcttcgatggtctcacaaaaatattaaacctctttctgatggagtcgtaaaaaagttttatctttctctcttcgatggtctcacaaaaatattaaacctctttctgatggagtcgtaaaaaagttttatctctttctctcttcgatggtctcacaaaaatattaaacctctttctgatggagtcgtaaaaaagttttatctctttctctcttcgatggtctcacaaaaatattaaacctctttctgatggagtcgtaaaaaagttttatctctttctctcttcgatggtctcacaaaaatattaaacctctttctgatggagtcgtaaaaaagttttatctctttctctcttcgatggtctcacaaaaatattaaacctctttctgatggagtcgtaaaaaagttttatctctttctctcttcgatggtctcacaaaaatattaaacctctttctgatggagtcgtaaaaaagttttatctctttctctcttcgatggtctcacaaaaatattaaacctctttctgatggagtcgtaaaaaagttttatctctttctctcttcgatggtctcacaaaaatattaaacctctttctgatggagtcgtaaaaaagttttatctctttctctcttcgatggtctcacaaaaatattaaacctctttctgatggagtcgtaaaaaagttttatctctttctctcttcgatggtctcacaaaaatattaaacctctttctgatggagtcgtaaaaaagttttatctctttctctcttcgatggtctcacaaaaatattaaacctctttctgatggagtcgtaaaaaagttttatctctttctctcttcgatggtctcacaaaaatattaaacctctttctgatggagtcgtaaaaaagttttatctctttctctcttcgatggtctcacaaaaatattaaacctctttctgatggagtcgtaaaaaagttttatctctttctctcttcgatggtctcacaaaaatattaaacctctttctgatggagtcgtaaaaaagttttatctctttctctcttcgatggtctcacaaaaatattaaacctctttctgatggagtcgtaaaaaagttttatctctttctctcttcgatggtctcacaaaaatattaaacctctttctgatggagtcgtaaaaaagttttatctctttctctcttcgatggtctcacaaaaatattaaacctctttctgatggagtcgtaaaaaagttttatctctttctctcttcgatggtctcacaaaaatattaaacctctttctgatggagtcgtaaaaaagttttatctctttctctcttcgatggtctcacaaaaatattaaacctctttctgatggagtcgtaaaaaagttttatctctttctctcttcgatggtctcacaaaaatattaaacctctttctgatggagtagtcgtaaaaaagttttatctctttctctcttcgatggtctcacaaaaatattaaacctctttctgatggagtcgtaaaaaagttttatctctttctctcttcgatggtctcacaaaaatattaaacctctttctgatggagtcgtaaaaaagttttatctctttctctcttcgatggtctcacaaaaatattaaacctctttctgatggagtcgtaaaaaagttttatctctttctctcttcgatggtctcacaaaaatattaaacctctttctgatggagtcgtaaaaaagttttatctctttctccttcgatggtctcacaaaaatattaaacctctttctgatggagtcgtaaaaaagttttatctctttctccttcgatggtctcacaaaaatattaaacctctttctgatggagtcgtaaaaaagttttatctctttctcctttctcacaaaaatattaaacctctttctgatggagtcgtaaaaaagttttatctctttctcctttctcacaaaaatattaaacctctttctgatggagtctccttcgatggtctcacaaaaatattaaacctctttctgatggagtcgtaaaaaagttttatctctttctccttcgatggtctcacaaaaatattaaacctctttctgatggagtcgtaaaaaagttttatctctttctccttcgatggtctcacaaaaatattaaacctctttctgatggagtcgtaaaaaagttttatctctttctccttcgatggtctcacaaaaatattaaacctctttctgatggagtcgtaaaaaagttttatctctttctcctttctcacaaaaatattaaacctctttctgatggagtcgtaaaaaagttttatctctttctccttcgatggtctcacaaaaatattaaacctctttctgatggagtcgtaaaaaagttttatctctttctccttcgatggtctcacaaaaatattaaacctctttctgatggagtcgtaaaaaagttttatctctttctccttcgatggtctcacaaaaatattaaacctctttctgatggtctctataaagcgattgatttttcttaccctctagagtttcctacggtcgttggtcacacatttttttctagacactaaataaatagtaaaattaaattaattataaaattatgtatatgatttactaactttagttagataagttagtaatacataaattttagtatattaatattatattttaaa

SEQ ID NO: 14 - DNA, 194908 bp, Artificial Sequence
  Vaccinia virus GLV-1h64 genome
ttatgagaccatcaaagagagaaagagaataaaaatatttttgtaaaactttttttatgagaccatcaaagagagaaagagaataaaaatatttttgtaaaacttttttatgagaccatcaaagagagaaagagaataaaaatatttttgtaaaacttttttatgagaccatcaaagagagaaagagaataaaaatatttttgtaaaactttttttatgagaccatcaaagagagaaagagaataaaaatatttttgtaaaactttttttatgagaccatcaaagagagaaagagaataaaaatatttttgtaaaactttttttatgagaccatcaaagagagaaagagaataaaaatatttttgtaaaactttttttatgagaccatcaaagagagaaagagaataaaaatatttttgtaaaactttttttatgagaccatcaaagagagaaagagaataaaaatatttttgtaaaactttttttatgagaccatcaaagagagaaagagaataaaaatatttttgtaaaactttttttatgagaccatcaaagagagaaagagaataaaaatatttttgtaaaactttttttatgagaccatcaaagagagaaagagaataaaaatatttttgtaaaactttttttatgagaccatcaaagagagaaagagaataaaaatatttttgtaaaactttttttatgagaccatcaaagagagaaagagaataaaaatatttttgtaaaactttttttatgagaccatcaaagagagaaagagaataaaaatatttttgtaaaactttttttatgagaccatcagaaagaggtttaatatttttgtgatactctgaaaggaaataggaataggaataggaatagtgtcataatcgtatcacactattgagacagaaaaagaagaagtcgcgagaggtaactttttgtgaatgtagttaagaacatttttgttttgcaaaccggaatatagtgtccggtacacttttttaattcgtggtgtgcctgaatcgttcgattaaccctactcatccaatttcagatgaatagagttatcgattcagacacacgctttgagttttgttgaatcgatgagtgaagtatcatcggttgcaccttcagatgccgatccgtcgacatacttgaatccatccttgacctcaagttcagatgattccttgcacatgtctccgatacgaacgctaaactctagattcttgacgcattttgtatcgacgatcgttgaaccgatgatatcttcgtaactcactttcttatgagagatgttagacccgagtactggatgggtcttgatgtcgctgtctttctcttcttcgctacatctgatgtcgatagacacttcacagtctttgatcatagcaagagcttcttcatgagtgatcgcgggagagtccttaccttgtcctggggacacgctggacaatctagcattcactgtgtttccatcagcggattctgagatggatttaatctgaggacatttggtgaatccaaagttcattctcagacctccaccgatgatggagtaataagtggtaggaggatctacatcctcgactgatgtggaatcatcttctgattccacctcgggatctggatctgactcggactctgtaatttccgttacggattggcaaatcttatcattggtcggtgtttggtcttgctttgtgactttgataataacatcgattcccatatgatgtttgttttcttcttccgtacacgaggaggaggatgaggatgattgctgaagactggcaggcatagcagctgccgccaggcacatgcatgccaggacgatatattgtttcataattgctattgattgagtactgttctttatgattctacttccttaccgtgcaataaattagaatatattttctacttttacgagaaattaattattgtatttattatttatgggtgaaaaacttactataaaaagtgggtgggtttggaattagtgatcagtttatgtatatcgcaactaccgggcatatggctatcgacatcgagaacattacccacatgataagagattgtatcagtttcgtagtcttgagtattggtattactatatagtatatagatgtcgcccactagagttactgtctccgaatgcggcatgatagtatcattctttgctttcgttaactgtttggaggaagaatctttgttattgcatttaatctcgaaattcagagtgcacacctttctcctgtaaagaaacctgaagtcgctaccttattaagaacggagaagtatccatcacgaaatacgggattacagtctttatgattcatagtaatagttagttccgacgttgagatggattcgctgagaccggtagtggtcgtccgagtacacgacgtgtcgttaactggatacaggttaatttccacatcgatatagttaaacgtatttctgggtacgggttcgcatttatctgcggaagagacggtgtgagaatatgttccgagaccacacggagaacagatgacgtctccggatactccgtatcctattccacattttgtttgggaaacacatgccttgcatccggatgatcctttgagaagacaataatatccgggagagcattcacagattctattgtgagtcgtgttacacgatcgcgtcttccgttacaacttagacaagcgggtaaatgattattgcgagatgtgaaggtacccgaaccacacggcgtacatcgtgtgttagtcttgctatcgcataatctggaagcgtatgttcccggacacaaattatggcgtttgtattcgttgtctttacactttccatcggatggtgcatgcggtgctatatctcttccgtttattattatacatgagagaaacaatatatacgagtataatacggacttcatgatttaataatgtagtaatcgttgtcttgttcctgtttcctacttctccaatcatatagatattttctttctatcatggataatatttgtaatggttctttccgtacaacatactgtttagatgatattgcgcataatttccggaggcaaatacgatagtctagattgaccgatggtagactctaatttattgagtgctttgtcgacgagtttacttttacgctccatcgatagatggcactgttctatgagatcgtcgtacatgggaaatgaaatgtgactgtctgaatgtatggctttaagatagctgtgataccgtatacaggtcggtgtcggagattcgaatctctttgaggcgacttatgtcacgatgatggaatctatcttatcgaatgatatatttttcataaatacacttttatagtcctcgtttaaacagaatttactatgtagttccgcgaatgactcgtcccttaataggcagtaggctagtatcttttttacgtagtaatcgtcgtagggagagacatcttgtagaacaacgatttcgttttgttttctcttctgtaactgcttttctggatggccgtattgattatcgagcgtgatactcgctccatattccaataaccgctttgcaaattgtatattattgacatcgaccgcgtaatatagtagagttatcgatcatatctatatcatccatgtacttgcttagtatatcaaatacatctatcagtatggtttcataacagtgatacccgcaattattaaatctcgataatatcagaccgtacatacatagacggccattgttcgatacgtgatttacagccgcgtgtccatattttccacgataaaccttacgacgtttacatcgacgagattattattaacaaagtagtcgtgtagaggatagttgttgtccgttatctaacatgcatcgaacgaccatatcgccgtaatgtaagtagtttatcagtatggcttgtacgatggattcatcctgttgtctaaatctctttagaatgttatcgatgatgtagtggttatattctctggaatcgtacgaagtaatactacgcattacgtcgacaagagtatgacgtctctcaataagaagattaacgatttccatgtctacattatatggggttactctaaatcgcttgtttagataatacgcctctaatatagggctgacgtcgtatactctacacgtgtccacatcctttattaataataatttaacaatctctatatctatggttgagaaagaccagtagtattggatgggtaaagatcctccttcgtctctgccatggatggaaacattgttatcgatcaaacatttaattacatccttggatagagattgagattctctatgagacgatatatagtaatgaagagagttcttacacatatcactgtcgtacatacaggtacgaaatacgtaaccggtgctgtaacattctgatttaagaagccatagcaatacttctggtctcggattaggcgtcgttacgtatatatccaccaatccgagaccattgattgcataattcgtattcttggacggacgtatccgtttatccacaattaggtattttagcagacgtaagtcgatattatccgaatacagatcgaaatcatttatattcgacttgagttcgttagaggaatttgaatagctggatatcagtagatgcacaatctgagattttacgtatctatgcttactgtatactcctagcggagttaatccttcgttgtttctacaaagtctctcgactccgcgagagaacaatcttaatgtctgtatcgcatttattggagacgtaacaatgtagcgcattgtttcctcgtctatctatatgttttgataagttgtgacacgtttcaatttctagttttatttttttgtacgtcacatcttcatccagtagacgacatagaatagtgcactctctaccacaataatccatagctattctggtgctaattattcctatttcacgaaggcaatcattcctcataagatgataaaaagtgtagtggagatttagtatttagcagtgcggatatgatccaagagggtgagatagtcgttctcgttcagaatctttcgcagcataagtagtatgtcgatatacttatcgttgaagactctttataaaagtctatttgtttatatttattgcggatagcagtatttccctataaaaagtatacgtcctgtggtgtctttaatcatgtacatgaatggatggtttatgtagaccttcgtacgatataccatcgaaaagttaatcgtaaatactcctgtaacggccgatgcttctgtatactcctcattaacatctataaacgtcgtatgtagaaatttttctacagtgatagtttcattacacatcttgctaaaatctgcataatatccgaatatattagtaagtcctaaattttctaaaatcggtaccagattatacggttctgtcatttccactttaaactttggcatatacaagtctatacttttagtagataacataccacaccattttttaaatttttcatctgttatatttttttctatgttatatataccttctatgtcgtccggtagtataattaccatactagagtttccctcgtatggaatatcgataatagagaatcctccgaataattcattaatatgtacatattgcaagttattctcggtacccaccatcatatcaacgctggtaactatattcttagaaatataaaacttgtctgtatatgtaagatgtttagaaaatggatatttccacattgctttaaaatggacggcgctaacaactgtcatacgagtattaatggatagcggactagtcaataaggaattaattttaccatttgtcattgtcttaacccattcgttgattagttcctttgtttggttagcattattaaagtttacagtttgaaaatcgtcttttattttttgtaggaaggaggcgtggaactcgatactatcgctaccgtatattttatttgcggtagctagtgtcgcacaatacggaatatctacctccatgtcatcattattgtcatcgggtgtattctcattcatattctctatatattttgatagttgttcagctgtagaaccagctgctccatgatttagaatagataaagtagataaaatggaaactggagaaatcaaaacattttcatcagggtgttttaagattagttctttaaagatatccatggtatagacctaacgataacgatatatatcataaataaataatgttaaatttcaatttatgtttgtaccccgtattcatacttaacaaattggtattgcgtacacaatcaatcatattacataccattaataatgcaagcataaaaaattgttagtagatgtttctaaatataggttccgtaagcaaagaatataagaatgaagcggtaatgataaaatcaatcgttatctaaaatgatcatactcatttattttattctattatattaacacatacatttttaacagcaacacattcaatattgtattgttatttttatattatttacacaattaacaatatattattagtttatattactgaattaataatataaaattcccaatcttgtcataaacacacactgagaaacagcataaacacagaatccatcaaaaatgttgataaattatctgatgttgttgttcgctgctatgataatcagatcattcgccgatagtggtaacgctatcgaaacgacattgccagaaattacaaacgctacaacagatattccagctatcagattatgcggtccagagggagatggatattgtttacacggtgactgtatccacgctagagatattgacggtatgtattgtagatgctctcatggttatacaggcattagatgtcagcatgtagtattagtagactatcaacgttcagaaaacccaaacactacaacgtcatatatcccatctcccggtattatgcttgtattagtaggcattattatgtgttgtctattatctgtttataggttcactcgacgaactaaactacctatacaagatatggttgtgccataatttttataaatttttttatgagtatttttacaaaaatgtataaagtgtatgtcttatgtatatttataaaaatgctaagtatgcgatgtatctatgttatttgtatttatctaaacaatacctctacctctagatattatacaaaaattttttatttcggcatattaaagtaaaatctagttaccttgaaaatgaatacagtgggtggttccgtatcaccagtaagaacataatagtcaaatacagtatccgattgagattttgcatacaatactagtctagaaagaaatttgtaatcatcttctgtgacgggagtccatatatctgtatcatcgtctagtttatcagtgtcccatgctatattcctgttatcatcattagttaatgaaaataactctcgtgcttcagaaaagtcaaatattgtatccatacatacatctccaaaactatcgcttatacgtttatctttaacgatacctatacctagatggttatttactaacagacattttccagatctattgactataactcctatagtttccacatcaaccaagtaatgatcatctattgttatataacaataacataactcttttccatttttatcagtatgtatatctatatcaacgtcgtcgttgtagtgaatagtagtcattgatctattatatgaaacggatatgtctagaacggcaattgttttacgtccagttaacactttcgttgatttaaagtctagagtctttgcaaacataatatccttatccgactttatatttcctgtagggtggtataattttattttgcctccacatatcggtgtttccaaatatattactagacaatattccatatagttattagttaagggtacccaattagaacacgtacgcttattatcatcatttggatcgtatttcataaaagttattgtgttatcgatgtcaacacattctacattttttaatcgtctatatagtatttttctgatattttctataatatcagaattgtcttccatcggaagttgtatactatcggaatcagttacatgtttaaataattctctgatgtcattccttatacaatcaaattcattattaaacagtttaatagtctgtagacctttatcgtcgtaaatatccattgtcttattagttacgcttatttttatgtgtttttacgttgctttattatattttataagaatgattgtttgacgaatcacgagaactattaagacacattattaggtatatattataaaaaagtttttgattacgatgttataagaggaaagaggacacattaacatcatacatcaattaactacattcttataacatcgtaatcaaaagaattgcaattttgatgtataacaactgtcaatgggttatggaattgtatattacatattatacggtatgttggtaacgacaaataccggtcggtaattgtctgccggtgtaatagaattatatatatctatctattacaccggccttgtatacataataataagttgtggtagtatgatctccatatttataatttaggactttgtattcagtatttttggaatcataaaaaataaaaaaaagttttactaatttaaaatttaaaaagtatttacatttttttcactgtttagtcgcggatatggaattcgatcctgccaaaatcaatacatcatctatagatcatgtaacaatattacaatacatagatgaaccaaatgatataagactaacagtatgcattatccgaaatattatatcaatatcacaaaaataaatacacatttggctaatcaatttcgggcttggaaaaaacgtatcgccggaagggactatatgactaacttatctagagatacaggaatacaacaatcaaaacttactgaaactatacgtaactgtcaaaaaaatagaaacatatatggtctatatatacactacaatttagttattaattggataaccgatgtgattatcaatcaatattaagagggttggtaaattggtacatagctaataatacctatactccaaatacacccaataatacaacaaccatttctgagttggatatcatcaaaatactaaataaatacgaggacgtgtatagagtaagtaaagaaaaagaatgtggaatttgctatgaagttgtttactcaaaacgatagatactttggtttattggattcgtgtactcatatattttgcataacatgcatcaatatatggcatagaacacgaagagaaaccggtgcgtcggataattgtcctatatgccgtacccgttttagaaacataacaatgagcaagttctataagctagttaactaataaataaaaagtttaatttgttgacgacgtatgtcgttattttttctcgtataaaagattaatttgattctaatataatctttagtattggataaatatcaattcaaattaattccattagattatatcataaataaaaatagtagcacacaactacttcagcaaacattctttttataaatgccatctagcgtagcgaggacacaagtgaacctataattatcaaatttattagtatcagtcacatgaaggactttacgtagagtgacgattccactatctgtggtacgaacggtttcatcttctttgatgccatcacccagatgttctataaacttggtatcctcgtccgatttcatatcctttgccaaccaatacatatagctaaactcaggcatatgttccacacatcctgaacaatgaaattctccagaagatgttacaatgtctagatttggacatttggtttcaaccgcgttaacatatgagtgaacacacccatacatgaaagcgatgagaaataggattctcatcttgccaaaatatcactagaaaaaatttatttatcagttttaaaggtataaaaaatacttattgttgctcgaatattttgtatttgatggtatacggaagattagaaatgtaggtattatcatcaactgattctatggttttatgtattctatcatgtttcactattgcgttggaaataatatcatatgcttccacatatattttattttgttttaactcataatactcacgtaattctggattattggcatatctatgaataattttagctccatgatcagtaaatattaatgagaacatagtattaccacctaccattatttttttcatctcattcaattcttaattgcaaagatctatataatcattatagcgttgacttatggactctggaatcttagacgatgtacagtcatctataatcatggcatatttaatacattgttttatagcatagtcgttatctacgatgttagatatttctctcaatgaatcaatcacacaatctaatgtaggtttatgacataatagcattttcagcagttcaatgtttttagattcgttgatggcaatggctatacatgtatatccgttatttgatctaatgttgacatctgaaccggattctagcagtaaagatactagagattgtttattatatctaacagccttgtgaagaagtgtttctcctcgtttgtcaatcatgttaatgtctttaagataaggtaggcaaatgtttatagtactaagaattgggcaagcataagacatgtcacaaagacccttttttgtatgtataagtgtaaaaattataacatccatagttggatttacataggtgtccaatcgggatctctccatcatcgagataattgatggcatctcccttccttttttagtagatatttcatcgtgtaagaatcaatattaatatttctaaagtatccgtgtatagcctctttatttaccacagctccatattccactagagggatatcgccgaatgtcatatactcaattagtatatgttggaggacatccgagttcattgttttcaatatcaaagagatggtttccttatcatttctccatagtggtacaatactacacattattccgtgcggctttccattttccaaaaacaatttgaccaaatctaaatctacatctttattgtatctataatcactatttagataatcagccataattcctcgagtgcaacatgttagatcgtctatatatgaataagcagtgttatctattcctttcattaacaatttaacgatgtctatatctatatgagatgacttaatataatattgaagagctgtacaatagtttttatctataaaagacggcttgattccgtgattaattagacatttaacaacttccggacgcacatatgctctcgtatccgactctgaatacagatgagagatgatatacagatgcaatacggtaccgcaatttcgtagttgataatcatcatacgcgtatcagtactcgtcctcataaagaacactgcagccattttctatgaacaaatcaataattttagaaacaggatcattgtcattacataattttctataactgaacgatggttttcacatttaacactcaagtcaaatccatgttctaccaacacctttatcaagtcaacgtctacatttttggatttcatatagctgaatatattaaagttatttatgttgctaaatccagtggcttctagtagagccatcgctatatccttattaactttaacatgtctactatttgtgtattcttctaatggggtaagctgtctccaatttttgcgtaatggattagtgccactgtctagtagtagtttgacgacctcgacattattacaatgctcattaaaaaggtatgcgtgtaaagcattattcttgaattggttcctggtatcattaggatctctgtctttcaacatctgtttaagttcatcaagagccacctcctcattttccaaatagtcaaacattttgactgaatgagctactgtgaactctatacacccacacaactaatgtcattaaatatcatgtcaaaaacttgtacaattattaataaaaataatttagtgtttaaattttaccagttccagattttacacctccgttaatacctccattaaccccactggacgatcctcctccccacattccaccgccaccagatgtataagttttagatcctttattactaccatcatgtccatggataaagacactccacatgccgccactaccccctttagaagacatattaataagacttaaggacaagtttaacaataaaattaatcacgagtaccctactaccaacctacactattatatgattatagtttctatttttacagtaccttgactaaagtttctagtcacaagagcaatactaccaacctacactattatatgattatagtttctatttttataggaacgcgtacgagaaaatcaaatgtctaatttctaacggtagtgttgataaacgattgttatccgcggatacctcctctatcatgtcgtctattttcttactttgttctattaacttattagcattatatattatttgattataaaacttatattgcttattagcccaatctgtaaatatcggattattaacatatcgtttctttgtaggtttatttaacatgtacatcactgtaagcatgtccttaccatttattttaatttgacgcatatccgcaatttctttttcgcagtcggttataaattctatatatgatggatacatgctacatgtgtacttataatcgactaatatgaagtacttgatacatattttcagtaacgatttattattaccacctatgaataagtacctgtgatcgtctaggtaatcaactgttttcttaatacattcgatggttggtaatttactcagaataatttccaatatcttaatatataattctgctatttctgggatatatttatctgccagtataacacaaatagtaatacatgtaaacccatattttgttattatattaatgtctgcgccattatctattaaccattctactaggctgacactatgcgactcaatacaatgataaagtatactacatccatgtttatctattttgtttatatcatcaatatacggcttacaaagttttagtatcgataacacatccaactcacgcatagagaaggtagggaataatggcataatatttattaggttatcatcattgtcattatctacaactaagtttccattttttaaaatatactcgacaactttaggatctctattgccaaatttttgaaaatatttatttatatgcttaaatctatataatgtagctccttcatcaatcatacatttaataacattgatgtatactgtatgataagatacatattctaacaatagatcttgtatagaatctgtatatcttttaagaattgtggatattaggatattattacataaactattacacaattctaaaatataaaacgtatcacggtcgaataatagttgatcaactatataattatcgattttgtgatttttcttcctaaactgtttacgtaaatagttagatagaatattcattagttcatgaccactatagttactatcgaataacgcgtcaaatatttcccgtttaatatcgcatttgtcaagataataatagagtgtggtatgttcacgataagtataataacgcatctctttttcgtgtgaaattaaatagtttattacgtccaaagatgtagcataaccatcttgtgacctagtaataatataataatagagaactgttttacccattctatcatcataatcagtggtgtagtcgtaatcgtaatcgtctaattcatcatcccaattataatattcaccagcacgtctaatctgttctattttgatcttgtatccatactgtatgttgctacatgtaggtattcctttatccaataatagtttaaacacatctacattgggatttgatgttgtagcgtatttttctacaatattaataccatttttgatactatttatttctatacctttcgaaattagtaatttcaataagtctatattgatgttatcagaacatagatattcgaatatatcaaaatcattgatatttttatagtcgactgacgacaataacaaaatcacaacatcgtttttgatattattatttttcttggtaacgtatgcctttaatggagtttcaccatcatactcatataatggatttgcaccactttctatcaatgattgtgcactgctggcatcgatgttaaatgttttacaactatcatagagtatcttatcgttaaccatgattggttgttgatgctatcgcattttttggtttctttcatttcagttatgtatggatttagcacgtttgggaagcatgagctcatatgatttcagtactgtagtgtcagtactattagtttcaataagatcaatctctagatctatagaatcaaaacacgataggtcagaagataatgaatatctgtaggcttcttgttgtactgtaacttctggttttgttagatggttgcatcgtgctttaacgtcaatggtacaaattttatcctcgctttgtgtatcatattcgtccctactataaaattgtatattcagattatcatgcgatgtgtatacgctaacggtatcaataaacggagcacaccatttagtcataaccgtaatccaaaaatttttaaagtatatcttaacgaaagaagttgtgtcattgtctacggtgtatggtactagatcctcataagtgtatatatctagagtaatgtttaatttattaaatggttgataatatggatcctcgtgacaatttccgaagatggaaataagacataaacacgcaataaatctaattgcggacatggttactccttaaaaaaatacgaataatcaccttggctatttagtaagtgtcatttaacactatactcatattaatccatggactcataatctctatacgggattaacggatgttctatatacggggatgagtagttctcttctttaactttatactttttactaatcatatttagactgatgtatgggtaatagtgtttgaagagctcgttctcatcatcagaataaatcaatatctctgtttttttgttatacagatgtattacagcctcatatattacgtaatagaacgtgtcatctaccttattaactttcaccgcatagttgtttgcaaatacggttaatcctttgacctcgtcgatttccgaccaatctgggcgtataatgaatctaaactttaattgcttgtaatcattcgaaataatttttagtttgcatccgtagttatcccctttatgtaactgtaaatttctcaacgcgatatctccattaataatgatgtcgaattcgtgctgtatacccatactgaatggatgaacgaataccgacggcgttaatagtaatttactttttcatctttacatattgggtactagttttactatcataagtttataaattccacaagctactatggaataagccaaccatcttagtataccacacatgtcttaaagtttattaattaattacatgttgttttatatatatcgctacgaatttaaagagaaattagtttaggaagaaaaattatctatctacatcatcacgtctctgtattctacgatagagtgctactttaagatgcgacagatccgtgtcatcaaatatatactccattaaaatgattattccggcagcgaacttgatattggatatatcacaacctttgttaatatctacgacaatagacagcagtcccatggttccataaacagtgagtttatctttctttgaagagatattttgtagagatcttataaaactgtcgaatgacatcgcatttatatctttagctaaatcgtatatgttaccatcgtaatatctaaccgcgtctatcttaaacgtttccatcgctttaaagacgtttccgatagatggtctcatttcatcagtcatactgagccaacaaatataatcgtgtataacatctttgatagaatcagactctaaagaaaacgaatcggctttattatacgcattcatgataaacttaatgaaaaatgtttttcgttgtttaagttggatgaatagtatgtcttaataattgttattatttcattaattaatatttagtaacgagtacactctataaaaacgagaatgacataactaatcataactagttatcaaagtgtctaggacgcgtaattttcatatggtatagatcctgtaagcattgtctgtattctggagctattttctctatcgcattagtgagttcagaatatgttataaatttaaatcgaataacgaacataactttagtaaagtcgtctatattaactcttttattttctagccatcgtaataccatgtttaagatagtatattctctagttactacgatctcatcgttgtctagaatatcacatactgaatctacatccaattttagaaattggtctgtgttacatatctcttctatattattgttgatgtattgtcgtagaaaactattacgtagaccattttctttataaaacgaatatatagtactccaattatctttaccgatatatttgcacacataatccattctctcaatcactacatctttaagattttcgttgttaagatatttggctaaactatataattctattagatcatcaacagaatcagtatatatttttctagatccaaagacgaactctttggcgtcctctataatattcccagaaaagatattttcgtgttttagtttatcgagatctgatctgttcatatacgccatgattgtacggtacgttatgataaccgcataaaataaaaatccattttcatttttaaccaatactattcataattgagattgatgtaatactttgttactttgaacgtaaagacagtacacggatccgtatctccaacaagcacgtagtaatcaaatttggtgttgttaaacttcgcaatattcatcaatttagatagaaacttatactcatcatctgttttaggaatccatgtattattaccactttccaacttatcattatcccaggctatgtttcgtccatcatcgttgcgcagagtgaataattcttttgtattcggtagttcaaatatatgatccatgcatagatcggcaaagctattgtagatgtgatttttcctaaatctaatataaaactcgtttactagcaaacactttcctgatttatcgaccaagacacatatggtttctaaatctatcaagtggtggggatccatagttatgacgcagtaacatatattattacattcttgactgtcgctaatatctaaatatttattgttatcgtattggattctgcatatagatggcttgtatgtcaaagatatagaacacataaccaatttatagtcgcgctttacattctcgaatctaaagttaagagatttagaaaacattatatcctcggatgatgttatcactgtttctggagtaggatatattaaagtctttacagatttcgtccgattcaaataaatcactaaataatatcccacattatcatctgttagagtagtatcattaaatctattatattttatgaaagatatatcactgctcacctctatatttcgtacatttttaaactgtttgtataatatctctctgatacaatcagatatatctattgtgtcggtagacgataccgttacatttgaattaatggtgttccattttacaacttttaacaagttgaccaattcatttctaatagtatcaaactctccatgattaaatattttaatagtatccattttatatcactacggacacaaagtagctgacataaaccattgtataatttttatgttttatgtttattagcgtacacattttggaagttccggcttccatgtatttcctggagagcaagtagatgatgaggaaccagatagtttatatccgtacttgcacttaaagtctacattgtcgttgtatgagtatgatcttttaaacccgctagacaagtatccgtttgatattgtaggatgtggacatttaacaatctgacacgtgggtggatcggaccattctcctcctgaacacaggacactagagttaccaatcaacgaatatccactattgcaactataagttacaacgctcccatcggtataaaaatcctcgtatccgttatgtcttccgttggatatagatggaggggattggcatttaacagattcacaaataggtgcctcgggattccataccatagatccagtagatcctaattcacaatacgatttagattcaccgatcaactgatatccgctattacaagagtacgttatactagagccaaagtctactccaccaatatcaagttggccattatcgatatctcgaggcgatgggcatctccgtttaatacattgattaaagagtgtccatccagtacctgtacatttagcatatataggtcccattttttgctttctgtatccaggtagacatagatattctatagtgtctcctatgttgtaattagcattagcatcagtctccacactattcttaaatttcatattaatgggtcgtgacggaatagtacagcatgatagaacgcatcctattcccaacaatgtcaggaacgtcacgctctccaccttcatatttatttatccgtaaaaatgttatcctggacatcgtacaaataataaaaagcccatatatgttcgctattgtagaaattgtttttcacagttgctcaaaaacgatggcagtgacttatgagttacgttacactttggagtctcatctttagtaaacatatcataatattcgatattacgagttgacatatcgaacaaattccaagtatttgattttggataatattcgtattttgcatctgctataattaagatataatcaccgcaagaacacacgaacatctttcctacatggttaaagtacatgtacaattctatccatttgtcttccttaactatatatttgtatagataattacgagtctcgtgagtaattccagtaattacatagatgtcgccgtcgtactctacagcataaactatactatgatgtctaggcatgggagacttttttatccaacgatttttagtgaaacattccacatcgtttaatactacatatttctcatacgtggtataaactccacccattacatatatatcatcgtttacgaataccgacgcgcctgaatatctaggagtaattaagtttggaagtcttatccatttcgaagtgccgtgtttcaaatattctgccacacccgttgaaatagaaaattctaatcctcctattacatataactttccatcgttaacacaagtactaacttctgattttaacgacgacatattagtaaccgttttccattttttcgttttaagatctacccgcgatacggaataaacatgtctattgttaatcatgccgccaataatgtatagacaattatgtaaaacatttgcattatagaattgtctatctgtattaccgactatcgtccaatattctgttctaggagagtaatgggttattgtggatatataatcagagtttttaatgactactatattatgttttataccatttcgtgtcactggctttgtagatttggatatagttaatcccaacaatgatatagcattgcgcatagtattagtcataaacttgggatgtaaaatgttgatgatatctacatcgtttggatttttatgtatccactttaataatatcatagctgtaacatcctcatgatttacgttaacgtcttcgtgggataagatagttgtcagttcatcctttgataattttccaaattctggatcggatgtcaccgcagtaatattgttgattatttctgacatcgacgcattatatagttttttaattccatatcttttagaaaagttaaacatccttatacaatttgtgaaattaatattatgaatcatagtttttacacatagatctactacaggcggaacatcaattattatggcagcaactagtatcatttctacattgtttatggtgatgtttatcttcttccagcgcatatagtctaatagcgattcaaacgcgtgatagtttataccattcaatataatcgcttcatcctttagatggtgatcctgaatgcgtttaaaaaaattatacggagacgccgtaataatttccttattcacttgtataatttccccattgatagaaaatattacgctttccattcttaaagtactataagtaattatagtataatgtaaacgtttatatattcaatatttttataaaaatcattttgacattaattcctttttaaatttccgtctatcatctatagaaacgtattctatgaatttataaaatgcttttacgtgtcctatcgtaggcgatagaaccgctaaaaagcctatcgaatttctacaaaagaatctgttatatggtatagggagagtataaaacattaaatgtccgtacttattaaagtattcagtagccaatcctaactctttcgaatacttattaatggctcttgttctgtacgaatctatttttttgaacaacggacctagtggtatatcttgttctatgtatctaaaataatgtctgactagatccgttagtttaatatccgcagtcatcttgtctagaatggcaaatctaactgcgggtttaggctttagtttagtttctatatctacatctatgtctttatctaacaccaaaaatataatagctaatattttattacaatcatccggatattcttctacgatctcactaactaatgtttctttggttatactagtatagtcactatcggacaaataaagaaaatcagatgatcgatgaataatacatttaaattcatcatctgtaagatttttgagatgtctcattagaatattattagggttagtactcattatcattcggcagctattacttattttattatttttcaccatatagatcaatcattagatcatcaaaatatgtttcaatcatcctaaagagtatggtgaatgactcttcccatctaatttctgaacgttcaccaatgtctctagccactttggcactaatagcgatcattcgcttagcgtcttctatattattaactggttgatttaatctatctagcaatggaccgtcggacagcgtcattctcatgttcttaatcaatgtacatacatcgccgtcatctaccaattcatccaacaacataagctttttaaaatcatcattataataggtttgatcgttgtcatttctccaaagaatatatctaataagtagagtcctcatgcttagttaacaactattttttatgttaaatcaattagtacaccgctatgtttaatacttattcatattttagtttttaggattgagaatcaatacaaaaattaatgcatcattaattttagaaatacttagtttccacgtagtcaatgaaacatttgaactcatcgtacaggacgttctcgtacaggacgtaactataaaccggtttatatttgttcaagatagatacaaatccgataactttttttacgaattctacgggatccactttaaaagtgtcataccgggttctttttatttttttaaacagatcaatggtgtgatgttgattaggtcttttacgaatttgatatagaatagcgtttacatattctccataatggtcaatcgccatttgttcgtatgtcataaattctttaattatatgacactgtgtattatttagttcatccttgttcattgttaggaatctatccaaaatggcaattatactagaactataggtgcgttgtatacacatattgatgtgtctgtttatacaatccatgatatttggatccatgctactaccttcgggtaaaattgtagcatcatataccatttctagtactttaggttcattattatccattgcagaggacgtcatgatcgaatcataaaaaaatatattatttttatgttattttgttaaaaataatcatcgaatacttcgtaagatactccttcatgaacataatcagttacaaaacgtttatatgaagtaaagtatctacgatttttacaaaagtccggatgcataagtacaaagtacgcgataaacggaataataatagatttatctagtctatctttttctatagctttcatagttagatacatggtctcagaagtaggattatgtaacatcagcttcgataaaatgactgggttatttagtcttacacattcgctcatacatgtatgaccgttaactacagagtctacactaaaatgattgaacaatagatagtctaccattgtttcgtattcagatagtacagcgtagtacatggcatcttcacaaattatatcattgtctaatagatatttgacgcatcttatggatcccacttcaacagccatcttaaaatcatattgctttcctttatcattaataatttctagaacatcatctctatcataaaagatacaaatattaactgtttgatccgtaataacattgctagtcaatagcaatttgttaataagatgcgctgggctcaatgtcttaataagaagtgtaagaggactatctccgaatttgttttgtttattaacatccgttgatggaagtaaaagatctataatgtctacattcttgactgttttagagcatacaatatggagaggtgtatttccatcatgatctggttttgagggactaattcctagtttcatcatccatgagattgtagaagcttttggattgtctgacataagatgtctatgaatatgatttttgccaaatttatccactatcctggcttcgaatccgatggacattatttttttaaacactctttctgaaggatctgtacacgccaacaacggaccacatccttcttcatcaaccgagttgttaatcttggctccatactgtaccaataaatttattctctctatgacttcatcatctgttcccgagagataatatagaggtgttttatgctgtttatcacacgcgtttggatctgcgccgtgcgtcagcagcatcgcgactattctattattattaattttagaagctatatgcaatggataatttccatcatcatccgtctcatttggagagtatcctctatgaagaagttcttcgacaaatcgttcatctagtcctttaattccacaatacgcatgtagaatgtgataattatttccagaaggttcgatagcttgtagcatattcctaaatacatctaaatttttactattatatttggcataaagagatagataatactcggccgacataatgttgtccattgtagtataaaaattaatatttctatttctatttctgtatatttgcaacaatttactctctataacaaatatcataacttagtttttttatgtcaagaaggcactggtttagttcatctataaatgtcacgccataactaccacgcatgccatactcagaattatgataaagatatttatccttggggtgtaggtaatggggattaatctttgttggatcagtctctaagttaacacatgtcacacatgatccatttatagttatatcacacgatgatgatttatgaattgattccggaagatcgctatcgtattttgtggttccacaattcatttccatacatgttattgtcacactaatattatgatgaactttatctagccgctgagtggtaaacaacagaacagatagtttattatctttaccaacaccctcagccgctgccacaaatctctgatccgtatccatgatggtcatgtttatttctagtccgtatccagtcaacactatgttagcatttctgtcgatatagctttcactcatatgacactcaccaataatagtagaattaatgtcgtaatttacaccaatagtgagttcggcggcaaagtaccaataccggtaatcttgtcgaggaggacatatagtattcttgtattctaccgaatacccgagagatgcgatacaaaagagcaagactaatttgtaaaccatcttactcaaaatatgtaacaatagtacgatgcaatgagtaagacaataggaaatctatcttatatacacataattattctatcaattttaccaattagttagtgtaatgttaacaaaaatgtgggagaatctaattagtttttctttacacaattgacgtacatgagtctgagttccttgtttttgctaattatttcatccaatttattattcttgacgatatcgagatcttttgtataggagtcaaacttgtattcaacatgcttttctataatcattttagctatttcggcatcatccaatagtacattttccagattagcagaatagatattaatgtcgtatttgaacagagcctgtaacatctcaatgtctttattatctatagccaatttaatgtccggaatgaagagaagggaattattggtgtttgtcgacgtcatatagtcgagcaagagaatcatcatatccacgtgtccattttttatagtgatgtgaatacaactaaggagaatagccagatcaaaagtagatggtatctctgaaagaaagtaggaaacaatacttacatcattaagcatgacggcatgataaaatgaagttttccatccagttttcccatagaacatcagtctccaatttttcttaacaaacagttttaccgtttgcatgttaccactatcaaccgcataatacaatgcggtgtttcccttgtcatcaaattgtgaatcatccagtccactgaatagcaaaatctttactattttggtatcttccaatgtggctgcctgatgtaatggaaattcattctctagaagatttttcaatgctccagcgttcaacaacgtacatactagacgcacgttattatcagctattgcataatacaaggcactatgtccatggacatccgccttaaatgtatctttactagagagaaagcttttcagctgcttagacttccaagtattaattcgtgacagatccatgtctgaaacgagacgctaattagtgtatattttttcattttttataattttgtcatattgcaccagaattaataatatctttaatagatctgattagtagatacatggctatcgcaaaacaacatatacacatttaataaaaataatatttattaagaaaattcagatttcacgtacccatcaatataaataaaataatgattccttacaccgtacccatattaaggagattccaccttacccataaacaatataaatccagtaatatcatgtctgatgatgaacacaaatggtgtattaaattccagtttttcaggagatgatctcgccgtagctaccataatagtagatgcctctgctacagttccttgttcgtcgacatctatctttgcattctgaaacattttataaatatataatgggtccctagtcatatgtttaaacgacgcattatctggattaaacatactaggagccatcatttcggctatcgacttaatatccctcttattttcgatagaaaatttagggagtttaagattgtacactttattccctaattgagacgaccaatagtctaattttgcagccgtgatagaatctgtgaaatgggtcatattatcacctattgccaggtacatactaatattagcatccttatacggaaggcgtaccatgtcatattctttgtcatcgattgtgattgtatttccttgcaatttagtaactacgttcatcatgggaaccgttttcgtaccgtacttattagtaaaactagcattgcgtgttttagtgatatcaaacggatattgccatatacctttaaaatatatagtattaatgattgcccatagagtattattgtcgagcatattagaatctactacattagacataccggatctacgttctactatagaattaattttattaaccgcatctcgtctaaagtttaatctatataggccgaatctatgatattgttgataatacgacggtttaatgcacacagtattatctacgaaactttgataagttagatcagtgtacgtatatttagatgttttcagcttagctaatcctgatattaattctgtaaatgctggacccagatctctttttctcaaatccatagtcttcaataattctattctagtattacctgatgcaggcaatagcgacataaacatagaaaacgaataaccaaacggtgagaagacaatattatcatcttgaatatttttatacgctactataccggcattggtaaatccttgtagacgataggcggacgctgaacacgctaacgatagtatcaataacgcaatcatgattttatggtattaataattaaccttatttttatgttcggtataaaaaaattattgatgtctacacatccttttgtaattgacatctatatatccttttgtataatcaactctaatcactttaacttttacagttttccctaccagtttatccctatattcaacatatctatccatatgcatcttaacactctctgccaagatagcttcagagtgaggatagtcaaaaagataaatatatagagcataatcattctcgtatactctgccctttattacatcacccgcattgggcaacgaataacaaaatgcaagcatcttgttaacgggctcgtaaattgggataaaaattatgtttttattgtcttatatctattttattcaagagaatattcaggaatttctttttccggttgtatctcgtcgcagtatatatcatttgtacattgtttcatattttttaatagtttacaccttttagtaggactagtatcgtacaattcatagctgtattttgaattccaatcacgcataaaaatatcttccaattgttgacgaagacctaatccatcatccggtgtaatattaatagatgctccacatgtatccgtaaagtaatttcctgtccaatttgaggtacctatataggccgttttatcggttaccatatatttggcatggtttaccctagaatacggaatgggaggatcagcatctggtacaataaatagctttacttctatatttatgtttttagattttagcatagcgatagatcttaaaaagtttctcatgataaacgaagatcgttgccagcaactaatcaatagcttaacggatacttgtctgtctatagcggatcttcttaattcatcttctatataaggccaaaacaaaattttacccgccttcgaataaataatagggataaagttcataacagatacataaacgaatttactcgcatttctaatacatgacaataaagcggttaaatcattggttctttccatagtacatagttgttgcggtgcagaagcaataaatacagagtgtggaacgccgcttacgttaatactaagaggatgatctgtattataatacgacggataaaagtttttccaattatatggtagattgttaactccaagataccagtatacctcaaaaatttgagtgagatccgctgccaagttcctattattgaagatcgcaatacccaattccttgacctgagttagtgatctccaatccatgttagcgcttcctaaataaatatgtgtattatcagatatccaaaattttgtatgaagaactcctcctaggatatttgtaatatctatgtatcgtacttcaactccggccatttgtagtctttcaacatcctttaatggtttgttagatttattaacggctactctaactcgtactcctcttttgggtaattgtacaatctcgtttaatattatcgtgccgaaattcgtacccacttcatccgataaactccaataaaaagatgatatatctagtgtttttgtggtattggatagaatttccctccacatgttaaatgtagacaaatatactttatcaaattgcatacctataggaatagtttctgtaatcactgcgattgtattatccggattcattttatttgttaaaagaataatcctatatcacttcactctattaaaaatccaagtttctatttctttcatgactgattttttaacttcatccgtttccttatgaagatgatgtttggcaccttcataaatttttatttctctattacaatttgcatgttgcatgaaataatatgcacctaaaacatcgctaatcttattgtttgttccctggagtatgagagtcggggggtgttaatcttggaaattatttttctaaccttgttggtagccttcaagacctgactagcaaatccagccttaattttttcatgattgactaatgggtcgtattggtatttataaactttatccatatctctagatactgattctggacatagctttccgactggcgcatttggtgtgatggttcccataagtttggcagctagcagattcagtcttgaaacagcatctgcattaactagaggagacattagaatcattgctgtaaacaagtttggattatcgtaagaggctagctcccatggaatgacccaataagtagatttaatagttaccacgtgctgtaccaaagtcatcaatcatcattttttcaccattacttcttccatgtccaatatgatcatgtgagaatactaaaattcctaacgatgatatgttttcagctagttcgtcataacgtccagaatgtttaccagctccatgacttatgaatactaatgccttaggatatgtaataggtttccaatatttacaatatatgtaatcattgtccagattgaacatacagtttgcactcatgattcacgttatataactatcaatattaacagttcgtttgatgatcatattatttttatgttttattgataattgtaaaaacatacaattaaatcaatatagaggaaggagacggctactgtcttttgtaagatagtcatggcgactaaattagattatgaggatgctgttttttactttgtggatgatgataaaatatgtagtcgcgactccatcatcgatctaatagatgaatatattacgtggagaaatcatgttatagtgtttaacaaagatattaccagttgtggaagactgtacaaggaattgatgaagttcgatgatgtcgctatacggtactatggtattgataaaattaatgagattgtcgaagctatgagcgaaggagaccactacatcaattttacaaaagtccatgatcaggaaagtttattcgctaccataggaatatgtgctaaaatcactgaacattggggatacaaaaagatttcagaatctagattccaatcattgggaaacattacagatttgatgaccgacgataatataaacatcttgatactttttctagaaaaaaaattgaattgatgatataggggtcttcataacgcataattattacgttagcattctatatccgtgttaaaaaaaattatcctatcatgtatttgagagttttatatgtagcaaacatgatagctgtgatgccaataagctttagatattcacgcgtgctagtgttagggatggtattatctggtggtgaaatgtccgttatataatctacaaaacaatcatcgcatatagtatgcgatagtagagtaaacatttttatagtttttactggattcatacatcgtctacccaattcggttataaatgaaattgtcgccaatcttacacccaaccccttgttatccattagcatagtattaacttcgttatttatgtcataaactgtaaatgattttgtagatgccatatcatacatgatattcatgtccctattataatcattactaactttatcacaatatatgttgataatatctatatatgatctagtctttgtgggcaactgtctatacaagtcgtctaaacgttgtttactcatatagtatcgaacagccatcattacatggtcccgttccgttgatagataatcgagtatgttagtggacttgtcaaatctatataccatattttctggaagtggatatacatagtcgtgatcaacattattgctagcctcatcttctatatcctgtactataccattatctatatcatctacataatctatgatattattacacataaacatcgacaacatactattgtttattatctaagtcctgttgatccaaacccttgatctcctctatttgtactatctagagattgtacttcttccagttctggataatatatacgttgatagattagctgagctattctatctccagtatttacattaaacgtacattttccattattaataagaatgactcctatgtttcccctataatcttcgtctattacaccacctcctatatcaatgccttttagtgacagaccagacctaggagctattctaccatagcagaacttaggcatggacatactaatatctgtcttaattaactgtctttctcctggagggatagtataatcgtaagcgctatacaaatcatatccggcagcacccggcgattgcctagtaggagatttagctctgttagtttccttaacaaatctaactggtgagttaatattcatgttgaacataaaactaatattttatttcaaaattatttaccatcccatatattccatgaataagtgtgatgattgtacacttctatagtatctatatacgatccacgataaaatcctcctatcaatagcagtttattatccactatgatcaattctggattatccctcggataaataggatcatctatcagagtccatgtattgctggattcacaataaaattccgcatttctaccaaccaagaataaccttctaccgaacactaacgcgcatgatttataatgaggataataagtggatggtccaaactgccactgatcatgattgggtagcaaatattctgtagttgtatcagtttcagaatgtcctcccattacgtatataacattgtttatggatgccactgctggattacatctaggtttcagaagactcggcatattaacccaagcagcatccccgtggaaccaacgctcaacagatgtgggatttggtagacctcctactacgtataatttattgttagcgggtatcccgctagcatacagtctggggctattcatcggaggaattggaatccaattgtttgatatataatttacagctatagcattgttatgtatttcattgttcatccatccaccgatgagatatactacttctccaacatgagtacttgtacacatatggaatatatctataatttgatccatgttcataggatactctatgaatggatacttgtatgatttgcgtggttgtttatcacaatgaaatattttggtacagtctagtatccattttacattatttatacctctgggagaaagataatttgacctgattacatttttgataaggagtagcagatttcctaatttatttcttcgcctcatataccacttaatgacaaaatcaactacataatcctcatctggaacatttagttcatcgctttctagaataagtttcatagatagataatcaaaattgtctatgatgtcatcttccagttccaaaaagtgtttggcaataaagtttttagtatgacataagagattggatagtccgtattctatacccatcatgtaacactcgacacaatattcctttctaaaatctcgtaagataaagtttatacaagtgtagatgataaattctacagaggttaatatagaagcacgtaataaattgacgacgttatgactatctatatatacctttccagtatatgagtaaataactatagaagttaaactgtgaatgtcaaggtctagacaaacccttgtaactggatctttatttttcgtgtatttttgacgtaaatgtgtgcgaaagtaaggagataactttttcaatatcgtagaattgactattatattgcctcctatggcatcaataattgttttgaatttcttagtcatagacaatgctaatatattcttacagtacacagtattgacaaatatcggcatttatgtttctttaaaagtcaacatctagagaaaaatgattatctttttgagacataactcccattttttggtattcacccacacgtttttcgaaaaaattagtttttccttccaatgatatattttccatgaaatcaaacggattggtaacattataaatttttttaaatcccaattcagaaatcaatctatccgcgacgaattctatatatgttttcatcatttcacaattcattcctataagtttaactggaagagccgcagtaagaaattcttgttcaatggatactgcatctgttataatagatctaacggtttcttcactcggtggatgcaataaatgtttaaacatcaaacatgcgaaatcgcagtgcagaccctcgtctctactaattagttcgttggaaaacgtgagtccgggcattaggccacgctttttaagccaaaatatggaagcgaatgatccagaaaagaaaattccttctactgcagcaaaggcaataagtctctctccataaccggcgctgtcatgtatccacttttgagcccaatcggccttcttttttacacaaggcatcgtttctatggcattaaagagatagtttttttcattactatctttaacataagtatcgatcaaaagactatacatttccgaatgaatgttttcaatggccatctgaaatccgtagaaacatctagcctcggtaatctgtacttctgtacaaaatcgttccgccaaattttcattcactattccgtcactggctgcaaaaaacgccaatacatgttttataaaatatttttcgtctggtgttagtttattccaatcattgatatctttagatatatctacttcttccactgtccaaaatgatgcctctgcctttttatacatgttccagatgtcatgatattggattgggaaaataacaaatctatttggatttggtgcaaggatgggttccataactaaattaacaataacaataaattttttttcagttatctatatgcctgtacttggattttttgtacatcgatatcgccgcaatcactacaataattacaagtattattgatagcattgttattagtactatcataattaaattatctacattcatgggtgctgaataatcgttattatcatcattatcattttgtaattgtgacatcatactagataaatcgtttgcgagattgttgtgggaagcgggcatggaggatgcattatcattattatttaacgccttccatttggattcacaaatgttacgcacattcaacattttatggaaactataattttgtgaaaacaaataacaagaaaactcgtcatcgttcaaatttttaacgatagtaaaccgattaaacgtcgagctaatttctaacgctagcgactctgttggatatgggtttccagatatatatcttttcagttcccctacgtatctataatcatctgtaggaaatggaagatatttccatttatctactgttcctaatatcatatgtggtggtgtagtagaaccattaagcgcgaaagatgttatttcgcatcgtattttaacttcgcaataatttctggttagataacgcactctaccagtcaagtcaatgatattagcctttacagatatattcatagtagtcgtaacgatgactccatcttttagatgcgatactcctttgtatgtaccagaatcttcgtacctcaaactcgatatatttaaacaagttaatgagatattaacgcgttttatgaatgatgatatataaccagaagttttatcctcggtggctagcgctataaccttatcattataataccaactagtgtgattaatatgtgacacgtcagtgtgggtacaaatatgtacattatcgtctacgtcgtattcgatacatccgcatacagccaacaaatataaaatgacaaatactctaacgccgttcgtacccatcttgatgcggtttaataaatgttttgatttcaatttattgtaaaaaaagattcggttttatactgttcgatattctcattgcttatattttcatctatcatctccacacagtcaaatccgtggttagcatgcacctcatcaaccggtaaaagactatcggactcttctatcattataactctagaatatttaatttggtcattattaatcaagtcaattatcttatttttaacaaacgtgagtattttactcattttttataaaaacttttagaaatatacagactctatcgtgtgtctatatcttctttttatatccaatgtatttatgtctgatttttcttcatttatcatatataatggtccaaattctacacgtgcttcggattcatccagatcattaaggttcttataattgtaacatccttctcttccctcttctacatcttccttcttattcttattcttagcgtcacagaatctaccacagcaggatcccatgacgagcgtcatattaaactaatccattttcaattataatatatgattagtaatgaccattaaaataaaaaatattcttcataaccggcaagaaagtgaaaagttcacattgaaactatgtcagtagtatacatcatgaaatgatgatatatatatactctattttggtggaggattatatgatataattcgtggataatcatttttaagacacatttctttattcgtaaatcttttcacgttaaatgagtgtccatattttgcaatttcttcatatgatggcggtgtacgtggacgaggctgctcctgttcttgttgtggtcgccgactgtcgtgtctgcgtttagatccctccattatcgcgattgcgtagatggagtactattttataccttgtaattaaatttttttattaattaaacgtataaaaacgttccgtatctgtatttaagagccagatttcgtctaatagaacaaatagctacagtaaaaataactagaataattgctacacccactagaaaccacggatcgtaatacggcaatcggttttcgataataggtggaacgtatattttatttaaggacttaacaattgtctgtaaaccacaatttgcttccgcggatcctgtattaactatctgtaaaagcatatgttgaccgggcggagccgaacattctccgatatctaatttctgtatatctataatattattaacctccgcatacgcattacagttcttttctagcttggataccgcactaggtacatcgtctagatctattcctatttcctcagcgatagctcttctatccttttccggaagcaatgaaatcacttcaataaatgattcaaccatgagtgtgaaactaagtcgagaattactcatgcatttgttagttattcggagcgcgcaatttttaaactgtcctataacctctcctatatgaatagcacaagtgacattagtagggatagaatgttgagctaatttttgtaaataactatctataaaaagattatacaaagttttaaactctttagtttccgccatttatccagtctgagaaaatgtctctcataataaatttttccaagaaactaattgggtgaagaatggaaacctttaatctatatttatcacagtctgttttggtacacatgatgaattcttccaatgccgtactaaattcgatatctttttcgatttctggatatgtttttaataaagtatgaacaaagaaatggaaatcgtaataccagttatgtttaactttgaaattgttttttattttcttgttaatgattccagccacttgggaaaagtcaaagtcgtttaatgccgatttaatacgttcattaaaaacaaactttttatcctttagatgaattattattggttcattggaatcaaaaagtaagatattatcgggtttaagatctgcgtgtaaaaagttgtcgcaacagggtagttcgtagattttaatgtataacagagccatctgtaaaaagataaactttatgtattgtaccaaagatttaaatcctaatttgatagctaactcggtatctactttatctgccgaatacagtgctaggggaaaaattataatgtttcctctttcatattcgtagttagttctcttttcatgttcgaaaaagtgaaacatgcggttaaaatagtttataacattaatattactgttaataactgccggataaaagtgggatagtaatttcacgaatttgatactgtcctttctctcgttaaacgcctttaaaaaaactttagaagaatatctcaatgagagttcctgaccatccatagtttgtatcaataatagcaacatatgaagaacacgtttatacagagtatgtaaaaatgttaatttatagtttaatcccatggcccacgcacacacgattaattttttttcatctccctttagattgttgtatagaaatttgggtactgtgaactccgccgtagtttccatgggactatataattttgtggcctcgaatacaaattttactacatagttatctatcttaaagactataccatatcctcctgtagatatgtgataaaaatcgtcgtttataggataaaatcgtttatccttttgttggaaaaaggatgaattaatgtaatcattctcttctatctttagtagtgtttccttattaaaattcttaaaataatttaacaatctaactgacggagcccaattttggtgtaaatctaattgggacattatattgttaaaatacaaacagtctcctaatataacagtatctgataatctatggggagacatccattgatattcaggggatgaatcattggcaacacccatttattgtacaaaaagccccaatttacaaacgaaagtccaggtttgatagagacaaacaattaactattttgtctctgtttttaacacctccacagtttttaatttctttagtaatgaaattattcacaatatcagtatcttctttatctaccagagattttactaacttgataaccttggctgtctcattcaatagggtagtaatatttgtatgtgtgatattgatatctttttgaattgtttcttttagaagtgattctttgatggtgccagcatacgaattacaataatgcagaaactcggttaacatgcaggaattatagtaagccaattccaattgttgcctgtgttgtattagagtgtcaatatgagcaatggtgtccttgcgtttctctgatagaatgcgagcagcgattttggcgttatcatttgacgatatttctggaatgacgaatcctgtttctactaactttttggtaggacaaagtgaaacaatcaagaagatagcttctcctcctatttgtggaagaaattgaactcctctagatgatctactgacgatagtatctccttgacagatattggaccgaattacagaagtacctggaatgtaaagccctgaaaccccctcattttttaagcagattgttgccgtaaatcctgcactatgcccaagatagagagctcctttggtgaatccatctctatgtttcagtttaaccaagaaacagtcagctggtctaaaatttccatctctatctaatacagcatctaacttgatgtcaggaactatgaccggtttaatgttatatgtaacattgagtaaatccttaagttcataatcatcactgtcatcagttatgtacgatccaaacaatgtttctaccggcatagtggatacgaagatgctatccatcagaatgtttccctgattagtattttctatatagctattcttctttaaacgattttccaaatcagtaactatgttcatttttttaggagtaggacgcctagccagtatggaagaggattttctagatcctctcttcaacatctttgatctcgatggaatgcaaaaccccatagtgaaacaaccaacgataaaaataatattgtttttcactttttataattttaccatctgactcatggattcattaatatctttataagagctactaacgtataattctttataactgaactgagatatatacaccggatctatggtttccataattgagtaaatgaatgctcggcaataactaatggcaaatgtatagaacaacgaaattatactagagttgttaaagttaatattttctatgagctgttccaataaattatttgttgtgactgcgttcaagtcataaatcatcttgatactatccagtaaaccgtttttaagttctggaatattatcatcccattgtaaagcccctaattcgactatcgaatatcctgctctgatagcagtttcaatatcgacggacgtcaatactgtaataaaggtggtagtattgtcatcatcgtgataaactacgggaatatggtcgttagtaggtacggtaactttacacaacgcgatatataactttccttttgtaccatttttaacgtagttgggacgtcctgcagggtattgttttgaagaaatgatatcgagaacagatttgatacgatatttgttggattcctgattattcactataatataatctagacagatagatgattcgataaatagagaaggtatatcgttggtaggataatacatccccattccagtattctcggatactctattgatgacactagttaagaacatgtcttctattctagaaaacgaaaacatcctacatggactcattaaaacttctaacgctcctgattgtgtctcgaatgcctcgtacaaggatttcaaggatgccatagattctttgaccaacgatttagaattgcgtttagcatctgatttttttattaaatcgaatggtcggctctctggtttgctaccccaatgataacaatagtcttgtaaagataaaccgcaagaaaatttatacgcatccatccaaataaccctagcaccatcggatgatattaatgtattattatagattttccatccacaattattgggccagtatactgttagcaacggtatatcgaatagattactcatgtaacctactagaatgatagttcgtgtactagtcataatatctttaatccaatctaaaaaatttaaaattagattttttacactgttaaagttaacaaaagtattacccgggtacgtggatatcatatatggcattggtccattatcagtaatagctccataaactgatacggcgatggtttttatatgtgtttgatctaacgaggaagaaattcgcgcccacaattcatctctagatatgtatttaatatcaaacggtaacacatcaatttcgggacgcgtatatgtttctaaatttttaatccaaatataatgatgacctatatgccctattatcatactgtcaactatagtacacctagggaacttacgatacatctgtttcctataatcgttaaattttacaaatctataacatgctaaaccttttgacgacagccattcattaatttctgatatggaatctgtattctcgataccgtatcgttctaaagccagtgctatatctccctgttcgtgggaacgctttcgtataatatcgatcaacggataatctgaagtttttggagaataatatgactcatgatctatttcgtccataaacaatctagacataggaattggaggcgatgatcttaattttgtgcaatgagtcgtcaatcctataacttctaatcttgtaatattcatcatcgacataatactatctatgttatcatcgtatattagtataccatgaccttcttcatttcgtgccaaaatgatatacagtcttaaatagttacgcaatatctcaatagtttcataattgttagctgttttcatcaaggtttgtatcctgtttaacatgatggcgttctataacgtctctattttctatttttaattttttaaatttttaacgatttactgtggctagatacccaatctctctcaaatatttttttagcctcgcttacaagctgtttatctatactattaaaactgacgaatccgtgattttggtaatgggttccgtcgaaatttgccgaagtgatatgaacatattcgtcgtcgactatcaacaattttgtattattctgaatagtgaaaaccttcacagatagatcattttgaacacacaacgcatctagacttttggcggttgccatagaatatacgtcgttcttatcccaattaccaactagaagtctgatcttaactcctctattaatggctgcttctataatggagttgtaaatgtcgggccaatagtagctattaccgtcgacacgtgtagtgggaactatggccaaatgttcaatatctatactagtcttagctgacctgagtttatcaataactacatcggtatctagatctctagaatatcccaataggtgttccggagaatcagtaaagaacactccacctataggattcttaatatgatacgcagtgctaactggcaaacaacaagccgcagagcataaattcaaccatgaattttttgcgctattaaaggctttaaaagtatcaaatcttctacgaagatctgtggccagcgggggataatcagaatatacacctaacgttttaatcgtatgtatagatcctccagtaaatgacgcgtttcctacataacatctttcatcatctgacacccaaaaacaaccgagtagtagtcccacattattttttttatctatattaacggttataaaatttatatccgggcagtgactttgtagctctcccagatttcttttccctcgttcatctagcaaaactattattttaatccctttttcagatgcctcttttagtttatcaaaaataagcgctcccctagtcgtactcagaggattacaacaaaaagatgctatgtatatatatttcttagctagagtgataatttcgttaaaacattcaaatgttgttaaatgatcggatctaaaatccatattttctggtagtgtttctaccagcctacattttgctcccgcaggtaccgatgcaaatggccacatttagttaacataaaaacttatacatcctgttctatcaacgattctagaatatcatcggctatatcgctaaaattttcatcaaagtcgacatcacaacctaactcagtcaatatattaagaagttccatgatgtcatcttcgtctatttctatatccgtatccattgtagattgttgaccgattatcgagtttaaatcattactaatactcaatccttcagaatacaatctgtgtttcattgtaaatttataggcggtgtatttaagttggtagattttcaattatgtattaatatagcaacagtagttcttgctcctccttgattctagcatcctcttcattattttcttctacgtacataaacatgtccaatacgttagacaacacaccgacgatggcggccgcagatctcgagttatgatctacttccttaccgtgcaataaattagaatatattttctacttttacgagaaattaattattgtatttattatttatgggtgaaaaacttactataaaaagcgggtgggtttggaattagtgaaagcttaaaaattgaaattttattttttttttttggaatataaataagctcgaagtcgacagatctaggcctggtaccaggaggaggaattcagcttaaagatgacttcgaaagtttatgatccagaacaaaggaaacggatgataactggtccgcagtggtgggccagatgtaaacaaatgaatgttcttgattcatttattaattattatgattcagaaaaacatgcagaaaatgctgttatttttttacatggtaacgcggcctcttcttatttatggcgacatgttgtgccacatattgagccagtagcgcggtgtattataccagatcttattggtatgggcaaatcaggcaaatctggtaatggttcttataggttacttgatcattacaaatatcttactgcatggtttgaacttcttaatttaccaaagaagatcatttttgtcggccatgattggggtgcttgtttggcatttcattatagctatgagcatcaagataagatcaaagcaatagttcacgctgaaagtgtagtagatgtgattgaatcatgggatgaatggcctgatattgaagaagatattgcgttgatcaaatctgaagaaggagaaaaaatggttttggagaataacttcttcgtggaaaccatgttgccatcaaaaatcatgagaaagttagaaccagaagaatttgcagcatatcttgaaccattcaaagagaaaggtgaagttcgtcgtccaacattatcatggcctcgtgaaatcccgttagtaaaaggtggtaaacctgacgttgtacaaattgttaggaattataatgcttatctacgtgcaagtgatgatttaccaaaaatgtttattgaatcggatccaggattcttttccaatgctattgttgaaggcgccaagaagtttcctaatactgaatttgtcaaagtaaaaggtcttcatttttcgcaagaagatgcacctgatgaaatgggaaaatatatcaaatcgttcgttgagcgagttctcaaaaatgaacaagcggccgccgccaccatgagcaagggcgaggaactgttcactggcgtggtcccaattctcgtggaactggatggcgatgtgaatgggcacaaattttctgtcagcggagagggtgaaggtgatgccacatacggaaagctcaccctgaaattcatctgcaccactggaaagctccctgtgccatggccaacactggtcactaccttcacctatggcgtgcagtgcttttccagatacccagaccatatgaagcagcatgactttttcaagagcgccatgcccgagggctatgtgcaggagagaaccatctttttcaaagatgacgggaactacaagacccgcgctgaagtcaagttcgaaggtgacaccctggtgaatagaatcgagctgaagggcattgactttaaggaggatggaaacattctcggccacaagctggaatacaactataactcccacaatgtgtacatcatggccgacaagcaaaagaatggcatcaaggtcaacttcaagatcagacacaacattgaggatggatccgtgcagctggccgaccattatcaacagaacactccaatcggcgacggccctgtgctcctcccagacaaccattacctgtccacccagtctgccctgtctaaagatcccaacgaaaagagagaccacatggtcctgctggagtttgtgaccgctgctgggatcacacatggcatggacgagctgtacaagtgagcggccgccctgctagcaagcttgctagcggccgctcgagatctgcggccgctacagacacgaatatgactaaaccgatgaccatttaaaaacccctctctagctttcacttaaactgtatcgatcattcttttagcacatgtataatataaaaacattattctatttcgaatttaggcttccaaaaatttttcatccgtaaaccgataataatatatatagacttgttaatagtcggaataaatagattaatgcttaaactatcatcatctccacgattagagatacaatatttacattctttttgctgtttcgaaactttatcaatacacgttaatacaaacccaggaaggagatattgaaactgaggctgttgaaaatgaaacggtgaatacaataattcagataatgtaaaatcatgattccgtattctgatgatattagaactgctaatggatgtcgatggtatgtatctaggagtatctattttaacaaagcatcgatttgctaatatacaattatccttttgattaattgttattttattcatattcttaaaaggtttcatatttatcaattcttctacattaaaaatttccatttttaatttatgtagccccgcaatactcctcattacgtttcattttttgtctataatatccattttgttcatctcggtacatagattatccaattgagaagcgcatttagtagttttgtacattttaagtttattgacgaatcgtcgaaaactagttatagttaacattttattatttgataccctgatattaatacccctgccgttactattatttataactgatgtaatccacgtaacattggaattaactatcgatagtaatgcatcgacgcttccaaaattgtctattataaactcaccgataatttttttattgcatgttttcatattcattaggattatcaaatctttaatcttattacgattgtatgcgttgatattacaagacgtcattctaaaagacggaggatctccatcaaatgccagacaatcacgtacaaagtacatggaaataggttttgttctattgcgcatcatagatttatatagaacacccgtagaaatactaatttgttttactctataaaatactaatgcatctatttcatcgttttgtataacgtctttccaagtgtcaaattccaaatttttttcattgatagtaccaaattcttctatctctttaactacttgcatagataggtaattacagtgatgcctacatgccgttttttgaaactgaatagatgcgtctagaagcgatgctacgctagtcacaatcaccactttcatatttagaatatatatatgtaaaaatatagtagaatttcattttgtttttttctatgctataaatgaattctcattttgcatctgctcatactccgttttatattaataccaaagaaggaagatatctggttctaaaagccgttaaagtatgcgatgttagaactgtagaatgcgaaggaagtaaagcttcctgcgtactcaaagtagataaaccctcatcgcccgcgtgtgagagaagaccttcgtccccgtccagatgcgagagaatgaataaccctggaaaacaagttccgtttatgaggacggacatgctacaaaatatgttcgcggctaatcgcgataatgtagcttctagacttttgtcctaaaatactattatatccttttcgatattaataaatccgtgtcgtccaggttttttatctctttcagtatgtgaatagataggtattttatctctattcatcatcgaatttaagagatccgataaacattgtttgtattctccagatgtcagcatctgatacaacaatatatgtgcacataaacctctggcacttatttcatgtaccttccccttatcactaaggagaatagtatttgagaaatatgtatacatgatattatcatgaattagatatacagaatttgtaacactctcgaaatcacacgatgtgtcggcgttaagatctaatatatcactcgataacacattttcatctagatacactagacattttttaaagctaaaatagtctttagtagtaacagtaactatgcgattattttcatcgatgatacatttcatcggcatattattacgcttaccatcaaagactataccatgtgtatatctaacgtattctagcatggttgccatacgcgcattaaacttttcaggatctttggatagatcttccaatctatctatttgagaaaacatttttatcatgttcaatagttgaaacgtcggatccactatatagatattatctataaagattttaggaactacgttcatggtatcctggcgaatattaaaactatcaatgatatgattatcgttttcatcttttatcaccatatagtttctaagatatgggattttacttaatataatattatttcccgtgataaattttattagaaaggccaaatctataagaaaagtcctagaattagtctgaagaatatctatatcgccgtatagtatatttggattaattagatatagagaatatgatccgtaacatatacaacttttattatggcgtctaagatattcttccatcaacttattaacatttttgactagggaagatacattatgacgtcccattacttttgccttgtctattactgcgacgttcatagaatttagcatatctcttgccaattcttccattgatgttacattataagaaattttagatgaaattacatttggagctttaatagtaagaactcctaatatgtccgtgtatgtggtcactaatacagattgtagttctataatcgtaaataatttacctatattatatgtttgagtctgtttagaaaagtagctaagtatacgatcttttatttctgatgcagatgtattaacatcggaaaaaaatctttttttattcttttttactaaagatacaaatatgtctttgttaaaaacagttattttctgaatatttctagcttgtaattttaacatatgatattcgttcacactaggtactctgcctaaataggtttctataatctttaatgtaatattaggaaaagtattctgatcaggattcctattcattttgaggatttaaaactctgattattgtctaatatggtctctacgcaaactttttcacagagcgatagagtttttgataactcgtttttcttaagaaatataaaactactgtctccagagctcgctctatcttttattttatctaattcgatacaaactcctgatactggttcagaaagtaattcattaattttcagtcctttatagaagatatttaatatagataatacaaaatcttcagtttttgatatcgatctgattgatcctagaactagatatattaataacgtgctcattaggcagtttatggcagcttgataattagatatagtatattccagttcatatttattagataccgcattgcccagattttgatattctatgaattcctctgaaaataaatccaaaataactagacattctattttttgtggattagtgtactctcttccctctatcatgttcactactggtgtccacgatgataaatatctagagggaatataatatagtccataggatgccaatctagcaatgtcgaataactgtaattttattcttcgctcttcattatgaattgattcttgaggtataaacctaacacaaattatattattagacttttcgtatgtaatgtctttcatgttataagtttttaatcctggaatagaatctattttaatgaggcttttaaacgcagagttctccaacgagtcaaagcataatactctgttgtttttcttatatacgatgttacgattttcttctttgaatggaataggtttttgaattagtttataattacaacataatagataaggaagtgtgcaaatagtacgcggaaaaaacataatagctcccctgttttcatccatggttttaagtaaatgatcactggcttctttagtcaatggatattcgaacattaaccgtttcatcatcattggacagaatccatatttcttaatgtaaagagtgatcaaatcattgtgtttattgtaccatcttgttgtaaatgtgtattcggttatcggatctgctcctttttctattaaagtatcgatgtcaatctcgtctaagaattcaactatatcgacatatttcatttgtatacacataaccattactaacgtagaatgtataggaagagatgtaacgggaacagggtttgttgattcgcaaactattctaatacataattcttctgttaatacgtcttgcacgtaatctattatagatgccaagatatctatataattattttgtaagatgatgttaactatgtgatctatataagtagtgtaataattcatgtattttgatatatgttccaactctgtctttgtgatgtctagtttcgtaatatctatagcatcctcaaaaaatatattcgcatatattcccaagtcttcagttctatcttctaaaaaatcttcaacgtatggaatataataatctattttacctcttctgatatcattaatgatatagtttttgacactatcttctgtcaattgattcttattcactatatctaagaaacggatagcgtccctaggacgaactactgccattaatatctctattatagcttctggacataattcatctattataccagaattaatgggaactattccgtatctatctaacatagttttaagaaagtcagaatctaagacttgatgttcatatattggttcatacatgaaatgatctctattgatgatagtgactatttcattctctgaaaattggtaactcattctatatatgctttccttgttgatgaaggatagaatatactcaatagaatttgtaccaacaaactgttctcttatgaatcgtatatcatcatctgaaataatcatgtaaggcatacatttaacaattagagacttgtctcctgttatcaatatactattcttgtgataatttatgtgtgaggcaaatttgtccacgttctttaattttgttatagtagatatcaaatccaatggagctacagttcttggcttaaacagatatagtttttctggaacaaattctacaacattattataaaggactttgggtagataagtgggatgaaatcctattttaattaatgcgatagccttgtcctcgtgcagatatccaaacgcttttgtgatagtatggcattcattgtctagaaacgctctacgaatatctgtgacagatatcatctttagagaatatactagtcgcgttaatagtactacaatttgtattttttaatctatctcaataaaaaaattaatatgtatgattcaatgtataactaaactactaactgttattgataactagaatcagaatctaatgatgacgtaaccaagaagtttatctactgccaatttagctgcattatttttagcatctcgtttagattttccatcggccttatcgaatactcttccgtcgatgtctacacaggcataaaatgtaggagagttactaggcccaactgattcaatacgaaaagaccaatctctcctagtaatttggcagtactcattaataacggtgacagggttagcatctttccaatcaataatttttttagccggaataacatcatcaaaagacttatgatcctctctcattgatttttcgcgggatacatcatctattatgacgtcagccatagcatcagcatccggcttatccgcctccgttgtcataaaccaacgaggaggaatatcgtcggagctgtacaccatagcactacgttgaagatcgtacagagctttattaacttctcgcttctccatattaagttgtctagttagttgtgcagcagtagctccttcgattccaatgtttttaatagccgcacacacaatctctgcgtcagaacgctcgtcaatatagatcttagacatttttagagagaactaacgcaaccagcaataaaactgaacctactttatcatttttttattcatcatcctctggtggttcgtcgttcctatcaaatgtagctctgattaacccgtcatctataggtgatgctggttctggagattctggaggagatggattattatctggaagaatctctgttatttccttgttttcatgtatcgattgcgttgtaacattaagattgcgaaatgctctaaatttgggaggcttaaagtgttgtttgcaatctctacacgcgtgtctaactagtggaggttcgtcagctgctctagtttgaatcatcatcggcgtagtattcctacttttacagttaggacacggtgtattgtatttctcgtcgagaacgttaaaataatcgttgtaactcacatcctttattttatctatattgtattctactcctttcttaatgcattttataccgaataagagatagcgaaggaattctttttcggtgccgctagtacccttaatcatatcacatagtgttttatattccaaatttgtggcaatagacggtttatttctatacgatagtttgtttctggaatcctttgagtattctataccaatattattctttgattcgaatttagtttcttcgatattagattttgtattacctatattcttgatgtagtactttgatgatttttccatggcccattctattaagtcttccaagttggcatcatccacatattgtgatagtaattctcggatatcagtagcggctaccgccattgatgtttgttcattggatgagtaactactaatgtatacattttccatttataacacttatgtattaactttgttcatttatattttttcattattatgttgatattaacaaaagtgaatatatatatgttaataattgtattgtggttatacggctacaattttataatgagtgaaagtcagtgtccgatgatcaatgacgatagctttactctgaaaagaaagtatcaaatcgatagtgcggagtcaacaataaaaatggataagaagaggataaagtttcagaatagagccaaaatggtaaaagaaataaatcagacaataagagcagcacaaactcattacgagacattgaaactaggatacataaaatttaagagaatgattatgactactactctagaagatatagcaccatctattccaaataatcagaaaacttataaactattctcggacatttcagccatcggcaaagcatcacagaatccgagtaagatggtatatgctctgctgctttacatgtttcccaatttgtttggagatgatcatagattcattcgttatagaatgcatccaatgagtaaaatcaaacacaagatcttctctcctttcaaacttaatcttattagaatattagtggaagaaagattctataataatgaatgcagatctaataaatggagaataattggaacacaagttgataaaatgttgatagctgaatctgataaatatacaatagatgcaaggtataacctaaaacccatgtatagaatcaagggagaatctgaagaagataccctctttatcaaacagatggtagaacaatgtgtgacatcccaggaattggtggaaaaagtgttgaagatactgtttagagatttgttcaagagtggagaatacaaagcgtacagatacgatgatgatgtagaaaatggatttattggattggatacactaaaattaaacattgttcatgatatagttgaaccatgtatgcctgttcgtaggccagtggctaagatactgtgtaaagaaatggtaaataaatactttgagaatccgctacatattattggtaaaaatcttcaagagtgcattgactttgttagtgaataggcatttcatctttctccaatactaattcaaattgttaaattaataatggatagtataaatagttattagttataagatagtaaaaataattattagaataagagtgtagtatcatagataactctcttctataaaaatggattttattcgtagaaagtatcttatatacacagtagaaaataatatagattttttaaaggatgatacattaagtaaagtaaacaattttaccctcaatcatgtactagctctcaagtatctagttagcaattttcctcaacacgttattactaaggatgtattagctaataccaatttttttgttttcatacatatggtacgatgttgtaaagtgtacgaagcggttttacgacacgcatttgatgcacccacgttgtacgttaaagcattgactaagaattatttatcgtttagtaacgcaatacaatcgtacaaggaaaccgtgcataaactaacacaagatgaaaaatttttagaggttgccgaatacatggacgaattaggagaacttataggcgtaaattatgacttagttcttaatccattatttcacggaggggaacccatcaaagatatggaaatcatttttttaaaactgtttaagaaaacagacttcaaagttgttaaaaaattaagtgttataagattacttatttgggcatacctaagcaagaaagatacaggcatagagtttgcggataatgatagacaaaatatatacactctatttcaacaaactggtagaatcgtccatagcaatctaacagaaacgtttagagattatatctttcccggagataagactagctattgggtgtggttaaacgaaagtatagctaatgatgcggatatcgttcttaatagacacgccattaccatgtatgataaaattcttagttatatatactctgagataaaacaaggacgcgttaataaaaacatgcttaagttagtttatatctttgagcctgaaaaagatatcagagaacttctgctagaaatcatatatgatattcctggagatatcctatctattattgatgcaaaaaacgacgattggaaaaaatattttattagtttttataaagctaattttattaacggtaatacatttattagtgatagaacgtttaacgaggacttattcagagttgttgttcaaatagatcccgaatatttcgataatgaacgaattatgtctttattctctacgagtgctgcggacattaaacgatttgatgagttagatattaataacagttatatatctaatataatttatgaggtgaacgatatcacattagatacaatggatgatatgaagaagtgtcaaatctttaacgaggatacgtcgtattatgttaaggaatacaatacatacctgtttttgcacgagtcggatcccatggtcatagagaacggaatactaaagaaactgtcatctataaaatccaagagtagacggctgaacttgtttagcaaaaacattttaaaatattatttagacggacaattggctcgtctaggtcttgtgttagatgattataaaggagacttgttagttaaaatgataaaccatcttaagtctgtggaggatgtatccgcattcgttcgattttctacagataaaaaccctagtattcttccatcgctaatcaaaactattttagctagttataatatttccatcatcgtcttatttcaaaggtttttgagagataatctatatcatgtagaagaattcttggataaaagcatccatctaaccaagacggataagaaatatatacttcaattgataagacacggtagatcatagaacagaccaaatatattattaataatttgtatatacatagatataattatcacacatttttgataaatgggaactgctgcaacaattcagactcccaccaaattaatgaataaagaaaatgcagaaatgattttggaaaaaattgttgatcatatagttatgtatattagtgacgaatcaagtgattcagaaaataatcctgaatatattgattttcgtaacagatacgaagactatagatctctcattataaaaagtgatcacgagtttgtaaagctatgtaaaaatcatgcggagaaaagttctccagaaacgcaacaaatgattatcaaacacatatacgaacaatatcttattccagtatctgaagtactattaaaacctataatgtccatgggtgacataattacatataacggatgtaaagacaatgaatggatgctagaacaactctctaccctaaactttaacaatctccgcacatggaactcatgtagcataggcaatgtaacgcgtctgttttatacattttttagttatctgatgaaagataaactaaatatataagtataatcccattctaatactttaacctgatgtattagcatcttattagaatattaacctaactaaaagacataacataaaaactcattacatagttgataaaaagcggtaggatataaatattatggctgccaccgttccgcgttttgacgacgtgtacaaaaatgcacaaagaagaattctagatcaagaaacattttttagtagaggtctaagtagaccgttaatgaaaaacacatatctatttgataattacgcgtatggatggataccagaaactgcaatttggagtagtagatacgcaaacctagatgctagtgactattatcccatttcgttgggattacttaaaaagttcgagtttctcatgtctctatataaaggtcctattcccgtatatgaagaaaaagtaaatactgaattcatagccaatggatcgttctctggtagatacgtatcatatcttcgaaagttttctgcccttccaacaaacgagtttattagttttttgttactgacttccattccaatctataatatcttgttctggtttaaaaacacacagtttgatattactaaacacacattattcagatacgtctatacagataatgccaaacacctggcgttggctaggtatatgcatcaaacaggagactataagcctttgtttagtcgtctcaaagagaattatatatttaccggtcccgttccaataagtatcaaagatatagatcaccctaatcttagtagagcaagaagtccatccgattatgagacattagctaatattagtactatattgtactttaccaagtatgatccggtattaatgtttttattgttttacgtacctgggtattcaattactacaaaaattactccagccgtagaatatctaatggataaactgaatctaacaaagagcgacgtacaactgttgtaaattattttatgcttcgtaaaatgtaggttttgaaccaaacattctttcaaagaatgagatgcataaaactttattatccaatagattgactatttcggacgtcaatcgtttaaagtaaacttcgtaaaatattctttgatcactgccgagtttaaaacttctatcgataattgtctcatatgttttaatatttacaagttttttggtccatggtacattagccggacaaatatatgcaaaataatatcgttctccaagttctatagtttctggattatttttattatattcagtaactaaatacatattagggttatctgcggatttataatttgagtgatgcattctactcaacataaataattctagaggagacgatctactatcaaattcggatcgtaaatctgtttctaaagaacggagaatatctatacatacctgattagaattcatccgtccttcagacaacatctcagacagtctggttttgtacatcttaatcatattcttatgaaacttggaaacatctcttctagtttcactagtacctttattaattctctcaggtacagattttgaattcgacgatgctgagtatttcatcgttgtatatttcttcttcgattgcataatcagattcttatataccgcctcaaactctattttaaaattattaaacaatactctattattaatcagtcgttctaactctttcgctatttctatagacttatctacatcttgactgtctatctctgtaaacacggagtcggtatctccatacacgctacgaaaacgaaatctgtaatctataggcaacgatgttttcacaatcggattaatatctctatcgtccatataaaatggattacttaatggattggcaaaccgtaacataccgttagataactctgctccatttagtaccgattctagatacaagatcattctacgtcctatggatgtgcaactcttagccgaagcgtatgagtatagagcactatttctaaatcccatcagaccatatactgagttggctactatcttgtacgtatattgcatggaatcatagatggccttttcagttgaactggtagcctgttttagcatctttttatatctggctctctctgccaaaaatgttcttaatagtctaggaatggttccttctatcgatctatcgaaaattgctatttcagagatgaggttcggtagtctaggttcacaatgaaccgtaatatatctaggaggtggatatttctgaagcaatagctgattatttatttcttcttccaatctattggtactaacaacgacaccgactaatgtttccggagatagatttccaaagatacacacattaggatacagactgttataatcaaagattaatacattattactaaacattttttgttttggagcaaataccttaccgccttcataaggaaacttttgttttgtttctgatctaactaagatagttttagtttccaacaatagctttaacagtggacccttgatgactgtactcgctctatattcgaataccatggattgaggaagcacatatgttgacgcacccgcgtctgtttttgtttctactccataatactcccacaaatactgacacaaacaagcatcatgaatacagtatctagccatatctaaagctatgtttagattataatccttatacatctgagctaaatcaacgtcatcctttccgaaagataatttatatgtatcattaggtaaagtaggacataatagtacgactttaaatccattttcccaaatatctttacgaattactttacatataatatcctcatcaacagtcacataattacctgtggttaaaacctttgcaaatgcagcggctttgcctttcgcgtctgtagtatcgtcaccgatgaacgtcatttctctaactcctctatttaatactttacccatgcaactgaacgcgttcttggatatagaatccaatttgtacgaatccaatttttcaaatttttgaatgaatgaatatagatcgaaaaatatagttccattattgttattaacgtgaaacgtagtattggccatgccgcctactcccttatgactagactgatttctctcataaatacagagatgtacagcttcctttttgtccggagatctaaagataattttctctcctgttaataactctagacgattagtaatatatctcagatcaaagttatgtccgttaaaggtaacgacgtagtcgaacgttagttccaacaattgtttagctattcgtaacaaaactatttcagaacatagaactagttctcgttcgtaatccatttccattagtgactgtatcctcaaacatcctctatcgacggcttcttgtatttcctgttccgttaacatctcttcattaatgagcgtaaacaataatcgtttaccacttaaatcgatataacagtaacttgtatgcgagattgggttaataaatacagaaggaaacttcttatcgaagtgacactctatatctagaaataagtacgatcttgggatatcgaatctaggtatttttttagcgaaacagttacgtggatcgtcacaatgataacatccattgttaatctttgtcaaatattgctcgtccaacgagtaacatccgtctggagatatcccgttagaaatataaaaccaactaatattgagaaattcatccatggtggcattttgtatgctgcgtttctttggctcttctatcaaccacatatctgcgacggagcattttctatctttaatatctagattataacttattgtctcgtcaatgtctatagttctcatctttcccaacggcctcgcattaaatggaggaggagacaatgactgatatatttcgtccgtcactacgtaataaaagtaatgaggaaatcgtataaatacggtctcgccatttcgacatctggatttcagatataaaaatctgttttcaccgtgactttcaaaccaattaatgcaccgaacatccatttatagaatttagaaatatattttcatttaaatgaatcccaaacattggggaagagccgtatggaccattatttttatagtactttcgcaagcgggtttagacggcaacatagaagcgtgtaaacgaaaactatatactatagttagcactcttccatgtcctgcatgtagacggcacgcgactatcgctatagaggacaataatgtcatgtctagcgatgatctgaattatatttattattttttcatcagattatttaacaatttggcatctgatcccaaatacgcgatcgatgtgacaaaggttaaccctttataaacttaacccattataaaacttatgattagtcacaactgaaataaccgcgtgattattttttggtataattctacacggcatggtttctgtgactatgaattcaacccccgttacattagtgaaatctttaacaaacagcaagggttcgtcaaagacataaaactcattgtttacaatcgaaatagaccccctatcacacttaaaataaaaaatatccttatcctttaccaccaaataaaattctgattggtcaatgtgaatgtattcacttaacagttccacaaatttatttattaactccgaggcacatacatcgtcggtattttttatggcaaactttactcttccagcatccgtttctaaaaaaatattaacgagttccatttatatcatccaatattattgaaatgacgttgatggacagatgatacaaataagaaggtacggtacctttgtccaccatctcctccaattcatgctctattttgtcattaactttaatgtatgaaaacagtacgccacatgcttccatgacagtgtgtaacactttggatacaaaatgtttgacattagtataattgtccaagactgtcaatctataatagatagtagctataatatattctatgatggtattgaagaagatgacaaccttggcatattgatcatttaacacagacatggtatcaacagatagcttgaatgaaagagaatcagtaattggaataagcgtcttctcgatagagtgtccgtataccaacatgtctgatattttgatgtattccattaaattatttagttttttctttttattctcgttaaacagcatttctgtcaacggaccccaacatcgttgaccgattaagttttgattgatttttccgtgtaaggcgtatctagtcagatcgtatagcctatccaataatccatcgtctgtgtgtagatcacatcgtacactttttaattctctatagaagagcgacagacatctggagcaattacagacagcaatttctttattctctacagatgtaagatacttgaagacattcctatgatgatgcagaattttggataacacggtattgatggtatctgttaccataattcctttgatggctgatagtgtcagagcacaagatttccaatctttgacaatttttagcaccattatctttgttttgatatctatatcagacagcatggtgcgtctgacaacacagggattaagacggaaagatgaaatgattctctcaacatcttcaatagataccttgctattttttctggcattatctatatgtgcgagaatatcctctagagaatcagtatcctttttgatgatagtggatctcaatgacatgggacgtttaaaccttcttattctatcaccagattgcatggtgatttgtcttctttcttttatcataatgtaatctctaaattcatcggcaaattgtctatatctaaaatcataatatgagatgtttacctctacaaatatctgttcgtccaatgttagagtatttacatcagttttgtattccaaattaaacatggcaacggatttaattttatattcctctattaagtcctcgtcgataataacagaatgtagataatcatttaatccgtcgtacatggttggaagatgcttgttgacaaaatctttaattgtcttgatgaaggtgggactatatctaacatcttgattaataaaatttataacattgtccataggatactttgtaactagttttatacacatctcttcatcggtaagtttagacagaatatcgtgaacaggtggtatattatattcatcagatatacgaagaacaatgtccaaatctatattgtttaatatattatatagatgtagcgtagctcctacaggaatatctttaactaagtcaatgatttcatcaaccgttagatctattttaaagttaatcatataggcattgatttttaaaaggtatgtagccttgactacattctcattaattaaccattccaagtcattgtgtgtaagaagattatattctatcataagcttgactacatttggtcccgataccattaaagaattcttatgatataaggaaacagattttaggtactcatctactctacaagaattttggagagccttaacgatatcagtgacgtttattatttcaggaggaaagaatctaacattgagaatatcggaattaatagcttccagatacagtgattttggcaatagtccgtgtaatccataatccagtaacacgagctggtgcttgctagacaccttttcaatgtttaatttttttgaaataagctttgataaagccttcctcgcaaattccggatacatgaacatgtcggcgacatgattaagtattgttttttcattatttttatattttctcaacaagttctcaataccccaatagatgatagaatatcacccaatgcgtccatgttgtctatttccaacaggtcgctatatccaccaatagaagtttttccaaaaaagattctaggaacagttctaccaccagtaatttgttcaaaataatcccgcaattcattttcgggtttaaattctttaatatcgacaatttcatacgctcctcttttgaaactaaacttatttagaatatccagtgcatttctacaaaaaggacatgtatacttgacaaaaattgtcactttgttattggccaacctttgttgtacaaattcctcggccattttaatatttaagtgatataaaactatctcgacttatttaactctttagtcgagatatatggacgcagatagctatatgatagccaactacagaaggcaaacgctataaaaaacataattacgacgagcatatttataaatatttttattcagcattacttgatatagtaatattaggcacagtcaaacattcaaccactctcgatacattaactctctcattttctttaacaaattctgcaatatcttcgtaaaaagattcttgaaactttttagaatatctatcgactctagatgaaatagcgttcgtcaacatactatgttttgtatacataaaggcgcccattttaacagtttctagtgacaaaatgctagcgatcctaggatcctttagaatcacatagattgacgattcgtctctcttagtaactctagtaaaataatcatacaatctagtacgcgaaataatattatccttgacttgaggagatctaaacaatctagttttgagaacatcgataagttcatcgggaatgacatacatactatctttaatagaactcttttcatccagttgaatggattcgtccttaaccaactgattaatgagatcttctattttatcattttccagatgatatgtatgtccattaaagttaaattgtgtagcgcttctttttagtctagcagccaatactttaacatcactaatatcgatatacaaaggagatgatttatctatggcattaagaattcgtttttcgacatccgtcaaaaccaattcctttttgcctgtatcatccagttttccatcctttgtaaagaaattattttctactagactattaataagactgataaggattcctccataattgcacaatccaaactttttaacaaaactagactttacgagatctacaggaatgcgtacttcaggttttttagcttgtgattttttcttttgcggacattttctagtaaccaactcatctaccatttcattgattttagcagtgaaataagctttcaatgcacgggcactgatactattgaaaacgagttgatcttcaaattccgccatttaagttcaccaaacaacttttaaatacaaatatatcaatagtagtagaataagaactataaaaaaaataataattaaccaaccccaacaaccggtattattagttgatgtggtagttttctcatcacttagaacagatttaacaatttctataaagtctgtcaaatcatcttccggagaccccataaatacaccaaatatagcggcgtacaacttatccatttatacattgaatattggcttttctttatcgctatcttcatcatattcatcatcaatatcaacaagtcccagattacgagccagatcttcttctacattttcagtcattgatacacgttcactatctccagagagtccgataacgttagccaccacttctctatcaatgattagtttcttgagcgcgaaagtaatttttgtttccgttccggatctatagaagacgataggtgtgataattgccttggccaattgtctttctcttttactgagtgattctagttcaccttctatagatctgagaatggatgattctccagtcgaaacatattctaccatggatccgtttaatttgttgatgaagatggattcatccttaaatgttttctctgtaatagtttccaccgaaagactatgcaaagaatttggaatgcgttccttgtgcttaatgtttccatagacggcttctagaagttgatacaacataggactagccgcggtaacttttatttttagaaagtatccatcgcttctatcttgtttagatttatttttataaagtttagtctctccttccaacataataaaagtggaagtcatttgactagataaactatcagtaagttttatagagatagacgaacaattagcgtattgagaagcatttagtgtaacgtattcgatacattttgcattagatttactaatcgattttgcatactctataacacccgcacaagtctgtagagaatcgctagatgcagtaggtcttggtgaagtttcaactctcttcttgattaccttactcatgattaaacctaaataattgtactttgtaatataatgatatatattttcactttatctcatttgagaataaaaatgtttttgtttaaccactgcatgatgtacagatttcggaatcgcaaaccaccagtggttttattttatccttgtccaatgtgaattgaatgggagcggatgcgggtttcgtacgtagatagtacattcccgtttttagaccgagactccatccgtaaaaatgcatactcgttagtttggaataactcggatctgctatatggatattcatagattgactttgatcgatgaaggctcccctgtctgcagccatttttatgatcgtcttttgtggaatttcccaaatagttttataaactcgcttaatatcttctggaaggtttgtattctgaatggatccaccatctgccataatcctattcttgatctcatcattccataattttctctcggttaaaactctaaggagatgcggattaactacttgaaattctccagacaatactctccgagtgtaaatattactggtatacggttccaccgactcattatttcccaaaatttgagcagttgatgcagtcggcataggtgccaccaataaactatttctaagaccgtatgttctgattttatcttttagaggttcccaattccaaagatccgacggtacaacattccaaagatcatattgtagaataccgttactggcgtacgatcctacatatgtatcgtatggtccttccttctcagctagttcacaactcgcctctaatgcaccgtaataaatggtttcgaagatcttcttatttagatcttgtgcttccaggctatcaaatggataatttaagagaataaacgcgtccgctaatccttgaacaccaataccgataggtctatgtctcttattagagatttcagcttctggaataggataataattaatatctataattttattgagatttctgacaattactttgaccacatccttcagtttgagaaaatcaaatcgcccatctattacaaacatgttcaaggcaacagatgccagattacaaacggctacctcattagcatccgcatattgtattatctcagtgcaaagattactacacttgatagttcctaaattttgttgattactctttttgttacacgcatccttataaagaatgaatggagtaccagtttcaatctgagattctataatcgctttccagacgactcgagcctttattatagatttgtatctcctttctctttcgtatagtgtatacaatcgttcgaactcgtctccccaaacattgtccaatccaggacattcatccggacacatcaacgaccactctccgtcatccttcactcgtttcataaagagatcaggaatccaaagagctataaatagatctctggttctatgttcctcgtttcctgtattctttttaagatcgaggaacgccataatatcagaatgccacggttccaagtatatggccataactccaggccgtttgtttcctccctgatctatgtatctagcggtgttattataaactctcaacattggaataataccgtttgatataccattggtaccggagatatagcttccactggcacgaatattactaattgatagacctattccccctgccattttagagattaatgcgcatcgttttaacgtgtcatagataccctctatgctatcatcgatcatgttaagtagaaaacagctagacatttggtgacgactagttcccgcattaaataaggtaggagaagcgtgcgtaaaccatttttcagaaagtagattgtacgtctcaatagctgagtctatatcccattgatgaattcctactgcgacacgcattaacatgtgctgaggtctttcaacgatcttgttgtttattttcaacaagtaggatttttccaaagttttaaaaccaaaatagttgtatgaaaagtctcgttcgtaaataataaccgagttgagtttatccttatatttgttaactatatccatggtgatacttgaaataatcggagaatgtttcccatttttaggattaacatagttgaataaatcctccatcacttcactaaatagtttttttgtttccttgtgtagatttgatacggctattctggcggctagaatggcataatccggatgttgtgtagtacaagtggctgctatttcggctgccagagtgtccaattctaccgttgttactccattatatattccttgaataaccttcatagctattttaataggatctatatgatccgtgtttaagccataacataattttctaatacgagacgtgattttatcaaacatgacattttccttgtatccatttcgtttaatgacaaacatttttgttggtgtaataaaaaaattatttaacttttcattaatagggatttgacgtatgtagcgtacaaaatgattgttcctggtatatagataaagagtcctatatatttgaaaatcgttacggctcgattaaactttaatgattgcatagtgaatatatcattaggatttaactccttgactatcatggcggcgccagaaattaccatcaaaagcattaatacagttataccgatcgcagttagaacggttatagcatccaccatttatatctaaaaattagatcaaagaatatgtgacaaagtcctagttgtatactgagaattgacgaaacaatgtttcttacatatttttttcttattagtaaccgacttaatagtaggaactggaaaactagacttgattattctataagtatagatacccttccaaataatattctctttgataaaagttccagaaaatgtagaattttttaaaaagttatcttttgctattaccaagattgtgtttagacgcttattattaatatgagtgatgaaatccacaccgcctctagatatcgcctttatttccacattagatggtaaatccaatagtgaaactatctttttaggaatgtatggactcgcgtttagaggagtaaacgtcttaggcgtcggaaaggatgattcatcaaacgaataaacaatttcacaaatggatgttaatgtattagtaggaaattttttgacgctattggaattgaagattctaatggatgatgttctacctatttcatccgataacatgttaatttccgacaccaacggttttaatatttcgatgatatacggtagtctctctttcggacttatatagcttattccacaatacgagtcattatatactccaaaaaacaaaataactagtataaaatctgtatcgaatgggaaaaacgaaattatcgacataggtatagaatccggaacattgaacgtattaatacttaattctttttctgtggtaagtaccgataggttattgacattgtatggttttaaatattctataacttgagacttgatagatattagtgatgaattgaaaattatttttatcaccacgtgtgtttcaggatcatcgtcgacgcccgtcaaccaaccgaacggagtaaaataaatatcattaatatatgctctagatattagtatttttatcaatcctttgattatcatcttctcgtaggcgaatgattccatgatcaagagtgatttaagaacatcctccggagtattaatgggcttagtaaacagtccatcgttgcaataataaaagttatccaagttaaaggatattatgcattcgtttaaagatatcacctcatctgacggagacaattttttggtaggttttagagactttgaagctacttgtttaacaaagttattcatcgtcgtctactattctatttaattttgtagttaatttatcacatatcacattaattgactttttggtccacttttccatacgtttatattcttttaatcctgcgttatccgtttccgttatatccagggatagatcttgcaagttaaatagaatgctcttaaataatgtcattttcttatccgctaaaaatttaaagaatgtataaacctttttcagagatttgaaactcttaggtggtgtcctagtacacaatatcataaacaaactaataaacattccacattcagattccaacagctgattaacttccacattaatacagcctattttcgctccaaatgtacattcgaaaaatctgaataaaacatcgatgtcacaatttgtattatccaatacagaatgtttgtgattcgtgttaaaaccatcggagaaggaatagaaataaaaattattatagtggtggaattcagttggaatattgcctccggagtcataaaaggatactaaacattgttttttatcataaattacacatttccaatgagacaaataacaaaatccaaacattacaaatctagaggtagaacttttaattttgtctttaagtatatacgataagatatgtttattcataaacgcgtcaaatttttcatgaatcgctaaggagtttaagaatctcatgtcaaattgtcctatataatccacttcggatccataagcaaactgagagactaagttcttaatacttcgattgctcatccaggctcctctctcaggctctattttcatcttgacgacctttggattttcaccagtatgtattcctttacgtgataaatcatcgattttcaaatccatttgtgagaagtctatcgccttagatactttttcccgtagtcgaggtttaaaaaaatacgctaacggtatactagtaggtaactcaaagacatcatatatagaatggtaacgcgtctttaactcgtcggttaactctttcttttgatcgagttcgtcgctactattgggtctgctcaggtgccccgactctactagttccaacatcataccgataggaatacaagacactttgccggcggttgtagatttatcatatttttccactacatatccgttacaatttgttaaaaatttagatacatctatattgctacataatccagctagtgaatatatatgacataataaattggtaaatcctagttctggtattttactaattactaaatctgtatatctttccatttatcatggaaaagaatttaccagatatcttcttttttccaaactgcgttaatgtattctcttacaaatattcacaagatgaattcagtaatatgagtaaaacggaacgtgatagtttctcattggccgtgtttccagttataaaacatagatggcataacgcacacgttgtaaaacataaaggaatatacaaagttagtacagaagcacgtggaaaaaaagtatctcctccatcactaggaaaacccgcacacataaacctaaccgcgaagcaatatatatacagtgaacacacaataagctttgaatgttatagttttctaaaatgtataacaaatacagaaatcaattcgttcgatgagtatatattaagaggactattagaagctggtaatagtttacagatattttccaattccgtaggtaaacgaacagatactataggtgtactagggaataagtatccatttagcaaaattccattggcctcattaactcctaaagcacaacgagagatattttcagcgtggatttctcatagacctgtagttttaactggaggaactggagtgggtaagacgtcacaggtacccaagttattgctttggtttaattatttatttggtggattctctactctagataaaatcactgactttcacgaaagaccagtcattctatctcttcctaggatagctttagttagattgcatagcaataccattttaaaatcattgggatttaaggtactagatggatctcctatttctttacggtacggatctataccggaagaattaataaacaaacaaccaaaaaaatatggaattgtattttctacccataagttatctctaacaaaactatttagttatggcactcttattatagacgaagttcatgagcatgatcaaataggagatattattatagcagtagcgagaaagcatcatacgaaaatagattctatgtttttaatgactgccacgttagaggatgacagggaacggctaaaagtatttttacctaatcccgcatttatacatattcctggagatacactgtttaaaattagcgaggtatttattcataataagataaatccatcttccagaatggcatacatagaagaagaaaagagaaatttagttactgctatacagatgtatactcctcctgatggatcatccggtatagtctttgtggcatccgttgcacagtgtcacgaatataaatcatatttagaaaaaagattaccgtatgatatgtatattattcatggtaaggtcttagatatagacgaaatattagaaaaagtgtattcatcacctaatgtatcgataattatttctactccttatttggaatccagcgttactatacgcaatgttacacacatttatgatatgggtagagtttttgtccccgctccttttggaggatcgcaacaatttatttctaaatctatgagagatcaacgaaaaggaagagtaggaagagttaatcctggtacatacgtctatttctatgatctgtcttatatgaagtctatacagcgaatagattcagaatttctacataattatatattgtacgctaataagtttaatctaacactccccgaagatttgtttataatccctacaaatttggatattctatggcgtacaaaggaatatatagactcgttcgatattagtacagaaacatggaataaattattatccaattattatatgaagatgatagagtatgctaaactttatgtactaagtcctattctcgctgaggagttggataactttgagaggacgggagaattaactagtattgtacgagaagccattttatctctaaatttacaaattaagattttaaattttaaacataaagatgatgatacgtatatacacttttgtaaaatattattcggtgtctataacggaacaaacgctactatatattatcatagacctctaacgggatatatgaatatgatttcagatactatatttgttcctgtagataataactaaaaatcaaactctaatgaccacatctttttttagagatgaaaaattttccacatctccttttgtagacacgactaaacattttgcagaaaaaagtttattagtgtttagataatcgtatacttcatcagtgtagatagtaaatgtgaacagataaaaggtattcttgctcaatagattggtaaattccatagaatatattaatcctttcttcttgagatcccacatcatttcaaccagagacgttttatccaatgatttacctcgtactataccacatacaaaactagattttgcagtgacgtcgtacctggtattcctaccaaacaaaattttacttttagttcttttagaaaattctaaggtagaatctctatttgccaatatgtcatctatggaattaccactagcaaaaaatgatagaaatatatattgatacatcgcagctggttttgatctactatactttaaaaacgaatcagattccataattgcctgtatatcatcagctgaaaaactatgttttacacgtattccttcggcatttctttttaatgatatatcttgtttagacaatgataaagttatcatgtccatgagagacgcgtctccgtatcgtataaatatttcattagatgttagacgcttcattaggggtatacttctataaggtttcttaatcagtccatcattggttgcgtcaagaactactatcggatgttgttgggtatctctagtgttacacatggccttactaaagtttgggtaaataactatgatatctctattaattatagatgcatatatttcattcgtcaaggatattagtatcgacttgctatcgtcattaatacgtgtaatgtaatcatataaatcatgcgatagccaaggaaaatttaaatagatgttcatcatataatcgtcgctataattcatattaatacgttgacattgactaatttgtaatatagcctcgccacgaagaaagctctcgtattcagtttcatcgataaaggataccgttaaatataactggttgccgatagtctcatagtctattaagtggtaagtttcgtacaaatacagaatccctaaaatattatctaatgttggattaatctttaccataactgtataaaatggagacggagtcataactattttaccgtttgtacttactggaatagatgaaggaataatctccggacatgctggtaaagacccaaatgtctgtttgaagaaatccaatgttccaggtcctaatctcttaacaaaaattacgatattcgatcccgatatcctttgcattctatttaccagcatatcacgaactatattaagattatctatcatgtctattctcccaccgttatataaatcgcctccgctaagaaacgttagtatatccatacaatggaatacttcatttctaaaatagtattcgttttctaattctttaatgtgaaatcgtatactagaaagggaaaaattatctttgagttttccgttagaaaagaaccacgaaactaatgttctgattgcgtccgattccgttgctgaattaatggatttacaccaaaaactcatataacttctagatgtagaagcattcgctaaaaaattagtagaatcaaaggatataagtagatgttccaacaagtgagcaattcccaagatttcatctatatcattctcgaatccgaaattagaaattcccaagtagatatcctttttcatccgatcgttgatgaaaatacgaactttattcggtaagacaatcatttactaaggagtaaaataggaagtaatgttcgtatgtcgttatcatcgtataaattaaaggtgtgttttttaccattaagtgacattataattttaccaatattggaattataatataggtgtatttgcgcactcgcgacggttgatgcatcggtaaatatagctgtatctaatgttctagtcggtatttcatcatttcgctgtctaataatagcgttttctctatctgtttccattacagctgcctgaagtttattggtcggataatatgtaaaataataagaaatacatacgaataacaaaaataaaataagatataataaagatgccatttagagatctaattttgtttaacttgtccaaattcctacttacagaagatgaggaatcgttggagatagtgtcttccttatgtagaggatttgaaatatcttataatgacttgataacttactttccagataggaaataccataaatatatttataaagtatttgaacatgtagatttatcggaggaattaagtatggaattccatgatacaactctgagagatttagtctatcttagattgtacaagtattccaagtgtatacggccgtgttataaattaggagataatctaaaaggcatagttgttataaaggacaggaatatttatattagggaagcaaatgatgacttgatagaatatctcctcaaggaatacactcctcagatttatacatattctaatgagcgcgtccccataactggttcaaaattaattctttgtggattttctcaagttacatttatggcgtatacaacgtcgcatataacaacaaataaaaaggtagatgttctcgtttccaaaaaatgtatagatgaactagtcgatccaataaattatcaaatacttcaaaatttatttgataaaggaagcggaacaataaacaaaatactcaggaagatattttattcggtaacaggtggccaaactccataggtagctttttctatttcggattttagaatttccaaattcaccagcgatttatcggttttggtgaaatccaaggatttattaatgtccacaaatgccatttgttttgtctgtggattgtatttgaaaatggaaacgatgtagttagatagatgcgctgcgaagtttcctattagggttccgcgcttcacgtcacccagcatacttgaatcaccatcctttaaaaaaaatgataagatatcaacatggagtatatcatactcgaattttaattcttctactgactcactgacattttcacaaatactacaatacggtttaccgaaaataatcagtacgttcttcatttatgggtatcaaaaacttaaaatcgttactgctggaaaataaatcactgacgatattagatgataatttatacaaagtatacaatggaatatttgtggatacaatgagtatttatatagccgtcgccaattgtgtcagaaacttagaagagttaactacggtattcataaaatacgtaaacggatgggtaaaaaagggagggcatgtaaccctttttatcgatagaggaagtataaaaattaaacaagacgttagagacaagagacgtaaatattctaaattaaccaaggacagaaaaatgttagaattagaaaagtgtacatccgaaatacaaaatgttaccggatttatggaagaagaaataaaggcagaaatgcaattaaaaatcgataaactcacatttcaaatatatttatctgattctgataacataaaaatatcattgaatgagatactaacacatttcaacaataatgagaatgttacattattttattgtgatgaacgagacgcagaattcgttatgtgtctcgaggctaaaacacatttctctaccacaggagaatggccgttgataataagtaccgatcaggatactatgctatttgcatctgctgataatcatcctaagatgataaaaaacttaactcaactgtttaaatttgttccctcggcagaggataactatttagcaaaattaacggcgttagtgaatggatgtgatttctttcctggactctatggggcatctataacacccaccaacttaaacaaaatacaattgtttagtgattttacaatcgataatatagtcactagtttggcaattaaaaattattatagaaagactaactctaccgtagacgtgcgtaatattgttacgtttataaacgattacgctaatttagacgatgtctactcgtatattcctccttgtcaatgcactgttcaagaatttatattttccgcattagatgaaaaatggaatgaatttaaatcatcttatttagaaagcgtgccgttaccctgccaattaatgtacgcgttagaaccacgcaaggagattgatgtttcagaagttaaaactttatcatcttatatagatttcgaaaatactaaatcagatatcgatgttataaaatctatatcctcgatcttcggatattctaacgaaaactgtaacacgatagtattcggcatctataaggataatttactactgagtataaataattcattttactttaacgatagtctgttaataaccaatactaaaagtgataatataataaatataggttactagattaaaaatggtgttccaactcgtgtgctctacatgcggtaaagatatttctcacgaacgatataaattgattatacgaaaaaaatcattaaaggatgtactcgtcagtgtaaagaacgaatgttgtaggttaaaattatctacacaaatagaacctcaacgtaacttaacagtgcaacctctattggatataaactaatatggatccggttaattttatcaagacatatgcgcctagaggttctattatttttattaattataccatgtcattaacaagtcatttgaatccatcgatagaaaaacatgtgggtatttattatggtacgttattatcggaacacttggtagttgaatctacctatagaaaaggagttcgaatagtcccattggatagtttttttgaaggatatcttagtgcaaaagtatacatgttagagaatattcaagttatgaaaatagcagctgatacgtcattaactttattgggtattccgtatggatttggtcatgatagaatgtattgttttaaattggtagctgactgttataaaaatgccggtattgatacatcgtctaaacgaatattgggcaaagatatttttctgagccaaaacttcacagacgataatagatggataaagatatatgattctaataatttaacattttggcaaattgattaccttaaagggtgagttaatatgcataactactcctccgttgttttttccctcgttctttttcttaacgttgtttgccatcactctcataatgtaaagatattctaaaatggtaaacttttgcatatcggacgcagaaattggtataaatgttgtaattgtattatttcccgtcaatggactagtcacagctccatcagttttatatcctttagagtatttctcactcgtgtctaacattctagagcattccatgatctgtttatcgttgatattggccggaaagatagattttttattttttattatattactattggcaattgtagatataacttctggtaaatatttttctaccttttcaatctcttctattttcaagccggctatatattctgctatattgttgctagtatcaataccttttctggctaagaagtcatatgtggtattcactatatcagttttaactggtagttccattagcctttccacttctgcagaataatcagaaattggttctttaccagaaaatccagctactataataggctcaccgatgatcattggcaaaatcctatattgtaccagattaatgagagcatatttcatttccaataattctgctagttcttgagacattgatttatttgatgaatctagttggttctctagatactctaccatttctgccgcatacaataacttgttagataaaatcagggttatcaaagtgtttagcgtggctagaatagtgggcttgcatgtattaaagaatgcggtagtatgagtaaaccgttttaacgaattatatagtctccagaaatctgtggcgttacatacatgagccgaatgacatcgaagattgtccaatatttttaatagctgctctttgtccattatttctatatttgactcgcaacaattgtagataccattaatcaccgattcctttttcgatgccggacaatagcacaattgtttagctttggactctatgtattcagaattaatagatatatctctcaatacagattgcactatacattttgaaactatgtcaaaaattgtagaacgacgctgttctgcagccatttaactttaaataatttacaaaaatttaaaatgagcatccgtataaaaatcgataaactgcgccaaattgtggcatatttttcagagttcagtgaagaagtgtctataaatgtagactcgacggatgagttaatgtatatttttgccgccttgggcggatctgtaaacatttgggcaattatacctctaagtgcatcagtgttttaccgaggagccgaaaatattgtgtttaatcttcctgtgtccaaggtaaaatcgtgtttgtgtagttttcacaatgatgccatcatagatatagaacctgatctggaaaataatctagtaaaactttctagttatcatgtagtaagtgtcgattgtaacaaggaactgatgcctattaggacagatactactatttgtctaagtatagatcaaaagaaatcttacgtgtttaattttcacaagtatgaagaaaaatgttgtggtagaaccgtcattcatctagaatggttgttgggctttatcaagtgtattagtcagcatcagcatctggctattatgtttaaagatgacaatattattatgaagactcctggtaatactgatgcgttttccagggaatattctatgactgaatgttctcaagaactacaaaagttttctttcaaaatagctatctcgtctctcaacaaactacgaggattcaaaaagagagtcaatgtttttgaaactagaatcgtaatggataatgacgataacattttaggaatgttgttttcggatagagttcaatcctttaagatcaacatctttatggcgtttttagattaatactttcaatgagataaatatgggtggcggagtaagtgttgagctccctaaacgggatccgcctccgggagtacccactgatgagatgttattaaacgtggataaaatgcatgacgtgatagctcccgctaagcttttagaatatgtgcatataggaccactagcaaaagataaagaggataaagtaaagaaaagatatccagagtttagattagtcaacacaggacccggtggtctttcggcattgttaagacaatcgtataatggaaccgcacccaattgctgtcgcacttttaatcgtactcattattggaagaaggatggaaagatatcagataagtatgaagagggtgcagtattagaatcgtgttggccagacgttcacgacactggaaaatgcgatgttgatttattcgactggtgtcagggggatacgttcgatagaaacatatgccatcagtggatcggttcagcctttaataggagtaatagaactgtagagggtcaacaatcgttaataaatctgtataataagatgcaaacattatgtagtaaagatgctagtgtaccaatatgcgaatcatttttgcattatttacgcgcacacaatacagaagatagcaaagagatgatcgattatattctaagacaacagtctgcggactttaaacagaaatatatgagatgtagttatcccactagagataagttagaagagtcattaaaatatgcggaacctcgagaatgttgggatccagagtgttcgaatgccaatgttaatttcttactaacacgtaattataataatttaggactttgcaatattgtacgatgtaataccagcgtgaacaacttacagatggataaaacttcctcattaagattgtcatgtggattaagcaatagtgatagattttctactgttcccgtcaatagagcaaaagtagttcaacataatattaaacactcgttcgacctaaaattgcatttgatcagtttattatctctcttggtaatatggatactaattgtagctatttaaatgggtgccgcggcaagcatacagacgacggtgaatacactcagcgaacgtatctcgtctaaattagaacaagaagcgaacgctagtgctcaaacaaaatgtgatatagaaatcggaaatttttatatccgacaaaaccatggatgtaacctcactgttaaaaatatgtgctctgcggacgcggatgctcagttggatgctgtgttatcagccgctacagaaacatatagtggattaacaccggaacaaaaagcatacgtgccagctatgtttactgctgcgttaaacattcagacgagtgtaaacactgttgttagagattttgaaaattatgtgaaacagacttgtaattctagcgcggtcgtcgataacaaattaaagatacaaaacgtaatcatagatgaatgttacggagccccaggatctccaacaaatttggaatttattaatacaggatctagcaaaggaaattgtgccattaaagcgttgatgcaattgacgactaaggccactactcaaatagcacctagacaagttgctggtacaggagttcagttttatatgattgttatcggtgttataatattggcagcgttgtttatgtactatgccaagcgtatgttgttcacatccaccaatgataaaatcaaacttattttagccaataaggaaaacgtccattggactacttacatggacacattctttagaacttctccgatggttattgctaccacggatatgcaaaactgaaaatatattgataatattttaatagattaacatggaagttatcgctgatcgtctagacgatatagtgaaacaaaatatagcggatgaaaaatttgtagattttgttatacacggtctagagcatcaatgtcctgctatacttcgaccattaattaggttgtttattgatatactattatttgttatagtaatttatatttttacggtacgtctagtaagtagaaattatcaaatgttgttggtggtgctagtcatcacattaactattttttattactttatactataatagtactagactgacttctaacaaacatctcacctgccataaataaatgcttgatattaaagtcttctatttctaacactattccatctgtggaaaataatactctgacattatcgctaattgacacatcggtgagtgatatgcctataaagtaataatcttctttgggcacatataccagtgtaccaggttctaacaacctatttactggtgctcctgtagcatactttttctttaccttgagaatatccatcgtttgcttggtcaatagcgatatgtgattttttatcaaccactcaaaaaagtaattggagtgttcatatcctctacgggctattgtctcatggccgtgtatgaaatttaagtaacacgactgtggtagatttgttctatagagccgattgccgcaaatagatagaactaccaatatgtctgtacaaatgttaaacattaattgattaacagaaaaaacaatgttcgttctgggaatagaaaccagatcaaaacaaaattcgttagaatatatgccacgtttatacatggaatataaaataactacagtttgaaaaataacagtatcatttaaacatttaacttgcggggttaatctcacaactttactgtttttgaactgttcaaaatatagcatcgatccgtgagaaatacgtttagccgcctttaatagaggaaatcccaccgcctttctggatctcaccaacgacgatagttctgaccagcaactcatttcttcatcatccacctgttttaacatataataggcaggagatagatatccgtcattgcaatattccttctcgtaggcacacaatctaatattgataaaatctccattctcttctctgcatttattatcttgtctcggtggctgattaggctgtggtcttggtttaggccttggtctatcgttgttgaatctattttggtcattaaatctttcatttcttcctggtatatttctatcacctcgtttggttggatttttgtctatattatcgtttgtaacatcggtacgggtattcatttatcacaaaaaaaacttctctaaatgagtctactgctagaaaacctcatcgaagaagataccatattttttgcaggaagtatatctgagtatgatgatttacaaatggttattgccggcgcaaaatccaaatttccaagatctatgctttctatttttaatatagtacctagaacgatgtcaaaatatgagttggagttgattcataacgaaaatatcacaggagcaatgtttaccacaatgtataatataagaaacaatttgggtctaggagatgataaactaactattgaagccattgaaaactatttcttggatcctaacaatgaagttatgcctcttattattaataatacggatatgactgccgtcattcctaaaaaaagtggtaggagaaagaataagaacatggttatcttccgtcaaggatcatcacctatcttgtgcattttcgaaactcgtaaaaagattaatatttataaagaaaatatggaatccgcgtcgactgagtatacacctatcggagacaacaaggctttgatatctaaatatgcgggaattaatgtcctgaatgtgtattctccttccacatccataagattgaatgccatttacggattcaccaataaaaataaactagagaaacttagtactaataaggaactagaatcgtatagttctagccctcttcaagaacccattaggttaaatgattttctgggactattggaatgtgttaaaaagaatattcctctaacagatattccgacaaaggattgattactataaatggagaatgttcctaatgtatactttaatcctgtgtttatagagcccacgtttaaacattctttattaagtgtttataaacacagattaatagttttatttgaagtattcgttgtattcattctaatatatgtattttttagatctgaattaaatatgttcttcatgcctaaacgaaaaatacccgatcctattgatagattacgacgtgctaatctagcgtgtgaagacgataaattaatgatctatggattaccatggatgacaactcaaacatctgcgttatcaataaatagtaaaccgatagtgtataaagattgtgcaaagcttttgcgatcaataaatggatcacaaccagtatctcttaacgatgttcttcgcagatgatgattcattttttaagtatttggctagtcaagatgatgaatcttcattatctgatatattgcaaatcactcaatatctagactttctgttattattattgatccaatcaaaaaataaattagaagctgtgggtcattgttatgaatctctttcagaggaatacagacaattgacaaaattcacagactttcaagattttaaaaaactgtttaacaaggtccctattgttacagatggaagggtcaaacttaataaaggatatttgttcgactttgtgattagtttgatgcgattcaaaaaagaatcctctctagctaccaccgcaatagatcctgttagatacatagatcctcgtcgtgatatcgcattttctaacgtgatggatatattaaagtcgaataaagtgaacaataattaattctttattgtcatcatgaacggcggacatattcagttgataatcggccccatgttttcaggtaaaagtacagaattaattagacgagttagacgttatcaaatagctcaatataaatgcgtgactataaaatattctaacgataatagatacggaacgggactatggacgcatgataagaataattttgaagcattggaagcaactaaactatgtgatgtcttggaatcaattacagatttctccgtgataggtatcgatgaaggacagttctttccagacattgtttaattctgtgagcgtatggcaaacggtaccgagctcaaaaattgaaaaactagcgtctttttttgctcgaagtcgacgccaccatgcttctggcgcggatgaacccgcaggtgcagcccgagaacaacggggcggacacgggtccagagcagccccttcgggcgcgcaaaactgcggagctgctggtggtgaaggagcgcaacggcgtccagtgcctgctggcgccccgcgacggcgacgcgcagccccgggagacctggggcaagaagatcgacttcctgctgtccgtagtcggcttcgcagtggacctggccaacgtgtggcgcttcccctacctctgctacaagaacggcggcggtgccttcttgatcccgtacacactgttccttatcatcgcggggatgcccctgttctacatggagctggctctgggacagtacaaccgggagggggctgccaccgtttggaaaatctgcccattcttcaaaggcgttggctatgctgtcatcctgatcgccctgtacgttggcttctactacaacgtcatcatcgcctggtcactctactacctcttctcctccttcaccctcaacctgccctggaccgactgtggccacacctggaacagccccaactgtaccgaccccaagctcctcaatggctccgtgcttggcaaccacaccaagtactccaagtacaagttcacgccggcagccgagttttatgagcgtggtgtcctgcaccttcacgagagcagcgggattcatgacatcggcctgccccagtggcagctcttgctctgtctgatggtcgtcgtcatcgtcttgtattttagcctctggaaaggggtgaagacatcaggaaaggtggtgtggatcacagccacgctgccttacttcgtgctgttcgtgctcctggtccatggcgtcacgctgcccggagcctccaatggcatcaatgcctacctgcacatcgacttctaccgcttgaaagaggccacggtatggattgatgccgcaactcagatatttttttccttgggggctggatttggagtattgattgcatttgccagttacaacaaatttgacaacaactgttacagggatgccctgctgaccagcagcatcaactgtatcaccagcttcgtctctgggttcgccatcttctccatccttggttacatggcccatgaacacaaggtcaacattgaggatgtggccacagaaggagctggcctagtgttcatcctgtatccagaggccatttctaccctgtctggatctacattctgggctgttgtgtttttcgtcatgctcctggcgctgggccttgacagctcaatgggaggcatggaggctgtcatcacgggcctggcagatgacttccaggtcctgaagcgacaccggaaactcttcacatttggcgtcaccttcagcactttccttctcgccctgttctgcataaccaagggtggaatttacgtcttgaccctcctggacacctttgctgcgggcacctccatcctttttgctgtcctcatggaagccatcggagtttcctggttttatggagtggacaggttcagcaacgacatccagcagatgatggggttcaggccgggtctatactggagactgtgctggaagttcgtcagtcctgccttcctcctgttcgtggttgtggtcagcatcatcaacttcaagccactcacctacgacgactacatcttcccgccctgggccaactgggtggggtggggcatcgccctgtcctccatggtcctggtgcccatctacgtcatctataagttcctcagcacgcagggctctctttgggagagactggcctatggcatcacgccagagaacgagcaccacctggtggctcagagggacatcagacagttccagttgcaacactggctggccatctgagatgggtaattaattaatttttatcgatctaattcaacaatgtctggagagctcggatccttctgtgagcgtatggcaaacgaaggaaaaatagttatagtagccgcactcgatgggacatttcaacgtaaaccgtttaataatattttgaatcttattccattatctgaaatggtggtaaaactaactgctgtgtgtatgaaatgctttaaggaggcttccttttctaaacgattgggtgaggaaaccgagatagagataataggaggtaatgatatgtatcaatcggtgtgtagaaagtgttacgtcggctcataatattatattttttatctaaaaaactaaaaataaacattgattaaattttaatataatacttaaaaatggatgttgtgtcgttagataaaccgtttatgtattttgaggaaattgataatgagttagattacgaaccagaaagtgcaaatgaggtcgcaaaaaaactgccgtatcaaggacagttaaaactattactaggagaattattttttcttagtaagttacagcgacacggtatattagatggtgccaccgtagtgtatataggatctgctcccggtacacatatacgttatttgagagatcatttctataatttaggagtgatcatcaaatggatgctaattgacggccgccatcatgatcctattttaaatggattgcgtgatgtgactctagtgactcggttcgttgatgaggaatatctacgatccatcaaaaaacaactgcatccttctaagattattttaatttctgatgtgagatccaaacgaggaggaaatgaacctagtacggcggatttactaagtaattacgctctacaaaatgtcatgattagtattttaaaccccgtggcgtctagtcttaaatggagatgcccgtttccagatcaatggatcaaggacttttatatcccacacggtaataaaatgttacaaccttttgctccttcatattcagctgaaatgagattattaagtatttataccggtgagaacatgagactgactcgagttaccaaattagacgctgtaaattatgaaaaaaagatgtactaccttaataagatcgtccgtaacaaagtagttgttaactttgattatcctaatcaggaatatgactattttcacatgtactttatgctgaggaccgtgtactgcaataaaacatttcctactactaaagcaaaggtactatttctacaacaatctatatttcgtttcttaaatattccaacaacatcaactgaaaaagttagtcatgaaccaatacaacgtaaaatatctagcaaaaattctatgtctaaaaacagaaatagcaagagatccgtacgcggtaataaatagaaacgtactactgagatatactaccgatatagagtataatgatttagttactttaataaccgttagacataaaattgattctatgaaaactgtgtttcaggtatttaacgaatcatccataaattatactccggttgatgatgattatggagaaccaatcattataacatcgtatcttcaaaaaggtcataacaagtttcctgtaaattttctatacatagatgtggtaatatctgacttatttcctagctttgttagactagatactacagaaactaatatagttaatagtgtactacaaacaggcgatggtaaaaagactcttcgtcttcccaaaatgttagagacggaaatagttgtcaagattctctatcgccctaatataccattaaaaattgttagatttttccgcaataacatggtaactggagtagagatagccgatagatctgttatttcagtcgctgattaatcaattagtagagatgagataagaacattataataatcaataatatatcttatatcttatatcttatatcttatatcttgtttagaaaaatgctaatattaaaatagctaacgctagtaatccaatcggaagccatttgatatctataatagggtatctaatttcctgatttaaatagcggacagctatattctcggtagctactcgtttggaatcacaaacattatttacatctaatttactatctgtaatggaaacgtttcccaatgaaatggtacaatccgatacattgcattttgttatatttttttttaaagaggctggtaacaacgcatcgcttcgtttacatggctcgtaccaacaataatagggtaatcttgtatctattcctatccgtactatgcttttatcaggataaatacatttacatcgtatatcgtctttgttagcatcacagaatgcataaatttgttcgtccgtcatgataaaaatttaaagtgtaaatataactattatttttatagttgtaataaaaagggaaatttgattgtatactttcggttctttaaaagaaactgacttgataaaaatggctgtaatctctaaggttacgtatagtctatatgatcaaaaagagattaatgctacagatattatcattagtcatgttaaaaatgacgacgatatcggtaccgttaaagatggtagactaggtgctatggatggggcattatgtaagacttgtgggaaaacggaattggaatgtttcggtcactggggtaaagtaagtatttataaaactcatatagttaagcctgaatttatttcagaaattattcgtttactgaatcatatatgtattcactgcggattattgcgttcacgagaaccgtattccgacgatattaacctaaaagagttatcgggacacgctcttaggagattaaaggataaaatattatccaagaaaaagtcatgttggaacagtgaatgtatgcaaccgtatcaaaaaattactttttcaaagaaaaaggtttgtttcgtcaacaagttggatgatattaacgttcctaattctctcatctatcaaaagttaatttctattcatgaaaagttttggccattattagaaattcatcaatatccagctaacttattttatacagactactttcccatccctccgttgattattagaccggctattagtttttggatagatagtatacccaaagagaccaatgaattaacttacttattaggtatgatcgttaagaattgtaacttgaatgctgatgaacaggttatccagaaggcggtaatagaatacgatgatattaaaattatttctaataacactaccagtatcaatttatcatatattacatccggcaaaaataatatgattagaagttatatcgtcgcccgacgaaaagatcagaccgctagatctgtaattggtcccagtacatctatcaccgttaatgaggtaggaatgcccgcatatattagaaatacacttacagaaaagatatttgttaatgcctttacagtggataaagttaaacaactattagcgtcaaaccaagttaaattttactttaataaacgattaaaccaattaacaagaatacgccaaggaaagtttattaaaaataaaatacatttattgcctggtgattgggtagaagtagctgttcaagaatatacaagtattatttttggaagacagccgtctctacatagatacaacgtcatcgcttcatctatcagagctaccgaaggagatactatcaaaatatctcccggaattgccaactctcaaaatgctgatttcgacggggatgaggaatggatgatattagaacaaaatcctaaagctgtaattgaacaaagtattcttatgtatccgacgacgttactcaaacacgatattcatggagcccccgtttatggatctattcaagatgaaatcgtagcagcgtattcattgtttaggatacaagatctttgtttagatgaagtattgaacatcttggggaaatatggaagagagttcgatcctaaaggtaaatgtaaattcagcggtaaagatatctatacttacttgataggtgaaaagattaattatccgggtctcttaaaggatggtgaaattattgcaaacgacgtagatagtaattttgttgtggctatgaggcatctgtcattggctggactcttatccgatcataagtcgaacgtggaaggtatcaactttattatcaagtcatcttatgtttttaagagatatctatctatttacggttttggggtgacattcaaagatctgagaccaaattcgacgttcactaataaattggaggccatcaacgtagaaaaaatagaacttatcaaagaagcatacgccaaatatctcaacgatgtaagagacgggaaaatagttccattatctaaagctttagaggcggactatgtggaatccatgttatccaacttgacaaatcttaatatccgagagatagaagaacatatgagacaaacgctgatagatgatccagataataacctcctgaaaatggccaaagcgggttataaagtaaatcccacagaactaatgtatattctaggtacgtatggacaacaaaggattgatggtgaaccagcagagactcgagtattgggtagagttttaccttactatcttccagactctaaggatccagaaggaagaggttacattcttaattctttaacaaaaggattaacgggttctcaatattacttttcgatgctggttgccagatctcaatctactgatatcgtctgtgaaacatcacgtaccggaacactggctagaaaaatcattaaaaagatggaggatatggtggtcgacggatacggacaagtagttataggtaatacgctcatcaagtacgccgccaattataccaaaattctaggctcagtatgtaaacctgtagatcttatctatccagatgagtccatgacttggtatttggaaattagtgctctgtggaataaaataaaacagggattcgtttactctcagaaacagaaacttgcaaagaagacattggcgccgtttaatttcctagtattcgtcaaacccaccactgaggataatgctattaaggttaaggatctgtacgatatgattcataacgtcattgatgatgtgagagagaaatacttctttacggtatctaatatagattttatggagtatatattcttgacgcatcttaatccttctagaattagaattacaaaagaaacggctatcactatctttgaaaagttctatgaaaaactcaattatactctaggtggtggaactcctattggaattatttctgcacaggtattgtctgagaagtttacacaacaagccctgtccagttttcacactactgaaaaaagtggtgccgtcaaacaaaaacttggtttcaacgagtttaataacttgactaatttgagtaagaataagaccgaaattatcactctggtatccgatgatatctctaaacttcaatctgttaagattaatttcgaatttgtatgtttgggagaattaaatccaaacatcactcttcgaaaagaaacagataaatatgtagtagatataatagtcaatagattatacatcaagagagcagaaataaccgaattagtcgtcgaatatatgattgaacgatttatctcctttagcgtcattgtaaaggaatggggtatggagacattcattgaggacgaggataatattagatttactgtctacctaaatttcgttgaaccggaagaattgaatcttagtaagtttatgatggttcttccgggggcagccaacaagggaaagattagtaaattcaagattcctatctctgattatacgggatatgacgacttcaatcaaacaaaaaagctcaataagatgactgtagaactcatgaatctaaaagaattgggttctttcgatttggaaaacgtcaacgtgtatcctggagtatggaatacatacgatatcttcggtatcgaggccgctcgtgaatacttgtgcgaagccatgttaaacacctatggagaagggttcgattatctgtatcagccttgtgatcttctcgctagtttactatgtgctagttacgaaccagaatcagtgaataaattcaagttcggcgcagctagtactcttaagagagctacgttcggagacaataaagcattgttaaacgcggctcttcataaaaagtcagaacctattaacgataatagtagctgccacttttttagcaaggtccctaatataggaactggatattacaaatactttatcgacttgggtcttctcatgagaatggaaaggaaactatctgataagatatcttctcaaaagatcaaggaaatggaagaaacagaagacttttaattcttatcaataacatatttttctatgatctgtcttttaaacgatggattttccacaaatgcgcctctcaagtccctcatagaatgatacacgtataaaaaatatagcataggcaatgactccttatttttagacattagatatgccaaaatcatagccccgcttctatttactcccgcagcacaatgaaccaacacgggctcgtttcgttgatcacatttagataaaaaggcggttacgtcgtcaaaatatttactaatatcggtagttgtatcatctaccaacggtatatgaataatattaatattagagttaggtaatgtatatttatccatcgtcaaatttaaaacatatttgaacttaacttcagatgatggtgcatccatagcatttttataatttcccaaatacacattattggttacccttgtcattatagtgggagatttggctttgtgcatatctccagttgaacgtagtagtaagtatttatacaaacttttcttatccatttataacgtacaaatggataaaactactttatcggtaaacgcgtgtaatttagaatacgttagagaaaaggctatagtaggcgtacaagcagccaaaacatcaacacttatattctttgttattatattggcaattagtgcgctattactctggtttcagacgtctgataatccagtctttaatgaattaacgagatatatgcgaattaaaaatacggttaacgattggaaatcattaacggatagcaaaacaaaattagaaagtgatagaggtagacttctagccgctggtaaggatgatatatttgaattcaaatgtgtggatttcggcgcctattttatagctatgcgattggataagaaaacatatctgccgcaagctattaggcgaggtactggagacgcgtggatggttaaaaaggcggcaaaggtcgatccatctgctcaacaattttgtcagtatttgataaaacacaagtctaataatgttattacttgtggtaatgagatgttaaatgaattaggttatagcggttattttatgtcaccgcattggtgttccgattttagtaatatggaatagtgttagataaatgcggtaacgaatgttcctgtaaggaaccataacagcttagatttaacgttaaagatgagcataaacataataaacaaaattacaatcaaacttataacattaatatcaaacaatccaaaaaatgaaatcagtggagtagtaaacgcgtacataactcctggataacgtttagcagctgccgttcctattctagaccaaaaattcggtttcatgttttcgaaacggtattctgcaacaagtcgaggatcgtgttctacatatttggcggcattatccagtatctgcctattgatcttcatttcgttttcgattctggctatttcaaaataaaatcccgatgatagacctccagactttataatttcatctacgatgttcagcgccgtagtaactctaataatataggctgataagctaacatcataccctcctgtatatgtgaatatggcatgatttttgtccattacaagctcggttttaactttattgcctgtaataatttctctcatctgtaggatatctatttttttgtcatgcattgccttcaagacgggacgaagaaacgtaatatcctcaataacgttatcgttttctacaataactacatattctacctttttattttctaactcggtaaaaaaattagaatcccatagggctaaatgtctagcgatatttcttttcgtttcctctgtacacatagtgttacaaaaccctgaaaagaagtgagtatacttgtcatcatttctaatgtttcctccagtccactgtataaacgcataatccttgtaatgatctggatcatccttgactaccacaacatttcttttttctggcataacttcgttgtcctttacatcatcgaacttctgatcattaatatgctcatgaacattaggaaatgtttctgatggaggtctatcaataactggcacaacaataacaggagttttcaccgccgccatttagttattgaaattaatcatatacaactctttaatacgagttatattttcgtctatccattgtttcacattgacatatttcgacaaaaagatataaaatgcgtattccaatgcttctctgtttaatgaattactaaaatatacaaacacgtcactgtctggcaataaatgatatcttagaatattgtaacaatttattttgtattgcacatgttcgtgatctatgagttcttcttcgaatggcataggatctccgaatctgaaaacgtataaataggagttagaataataatatttgagagtattggtaatatataaactctttagcggtataattagtttttttctctcaatttctatttttagatgtgatggaaaaatgactaattttgtagcattagtatcatgaactctaatcaaaatcttaatatcttcgtcacacgttagctctttgaagtttttaagagatgcatcagttggttctacagatggagtaggtgcaacaattttttgttctacacatgtatgtactggagccattgttttaactataatggtgcttgtatcgaaaaactttaatgcagatagcggaagctcttcgccgcgactttctacgtcgtaattgggttctaacgccgatctctgaatggatactagttttctaagttctaatgtgattctctgaaaatgtaaatccaattcctccggcattatagatgtgtatacatcggtaaataaaactatagtatccaacgatcccttctcgcaaattctagtcttaaccaaaaaatcgtatataaccacggagatggcgtatttaagagtggattcttctaccgttttgttcttggatgtcatataggaaactataaagtccgcactactgttaagaatgattactaacgcaactatatagtttaaattaagcattttggaaacataaaataactctgtagacgatacttgactttcgaataagtttgcagacaaacgaagaaagaacagacctctcttaatttcagaagaaaactttttttcgtattcctgacgtctagagtttatatcaataagaaagttaagaattagtcggttaatgttgtatttcattacccaagtttgagatttcataatattatcaaaagacatgataatattaaagataaagcgctgactatgaacgaaatagctatatggttcgctcaagaatatagtcttgttaaacgtggaaacgataactgtatttttaatcacgtcagcggcatctaaattaaatataggtatatttattccacacactctacaatatgccacaccatcttcataataaataaattcgttagcaaaattattaattttagtgaaatagttagcgtcaactttcatagcttccttcaatctaatttgatgctcacacggtgcgaattccactctaacatcccttttccatgcctcaggttcatcgatctctataatatctagttttttgcgtttcacaaacacaggctcgtctctcgcgatgagatctgtatagtaactatgtaaatgataactagatagaaagatgtagctatatagatgacgatcctttaagagaggtataataactttaccccaatcagatagactgttgttatggtcttcggaaaaagaatttttataaatttttccagtattttccaaatatacgtacttaacatctaaaaaatccttaatgataataggaatggataatccgtctattttataaagaaatacatatcgcacattatacttttttttggaaatgggaataccgatgtgtctacataaatatgcaaagtctaaatattttttagagaatcttagttggtccaaattcttttccaagtacggtaatagatttttcatattgaacggtatcttcttaatctctggttctagttccgcattaaatgatgaaactaagtcactatttttataactaacgattacatcacctctaacatcatcatttaccagaatactgatcttcttttgtcgtaaatacatgtctaatgtgttaaaaaaaagatcatacaagttatacgtcatttcatctgtggtattcttgtcattgaaggataaactcgtactaatctcttctttaacagcctgttcaaatttatatcctatatacgaaaaaatagcaaccagtgtttgatcatccgcgtcaatattctgttctatcgtagtgtataacaatcgtatatcttcttctgtgatagtcgatacgttataaaggttgataacgaaaatatttttatttcgtgaaataaagtcatcgtaggattttggacttatattcgcgtctagtagatatgcttttatttttggaatgatctcaattagaatagtctctttagagtccatttaaagttacaaacaactaggaaattggtttatgatgtataatttttttagtttttatagattctttattctatacttaaaaaatgaaaataaatacaaaggttcttgagggttgtgttaaattgaaagcgagaaataatcataaattatttcattatcgcgatatccgttaagtttgtatcgtaatggcgtggtcaattacgaataaagcggatactagtagcttcacaaagatggctgaaatcagagctcatctaaaaaatagcgctgaaaataaagataaaaacgaggatattttcccggaagatgtaataattccatctactaagcccaaaaccaaacgagccactactcctcgtaaaccagcggctactaaaagatcaaccaaaaaggaggaagtggaagaagaagtagttatagaggaatatcatcaaacaactgaaaaaaattctccatctcctggagtcagcgacattgtagaaagcgtggccgctgtagagctcgatgatagcgacggggatgatgaacctatggtacaagttgaagctggtaaagtaaatcatagtgctagaagcgatctctctgacctaaaggtggctaccgacaatatcgttaaagatcttaagaaaattattactagaatctctgcagtatcgacggttctagaggatgttcaagcagctggtatctctagacaatttacttctatgactaaagctattacaacactatctgatctagtcaccgagggaaaatctaaagttgttcgtaaaaaagttaaaacttgtaagaagtaaatgcgtgcacttttttataaagatggtaaactctttaccgataataattttttaaatcctgtatcagacgataatccagcgtatgaggttttgcaacatgttaaaattcctactcatttaacagatgtagtagtatatgaacaaacgtgggaggaggcgttaactagattaatttttgtgggaagtgattcaaaaggacgtagacaatacttttacggaaaaatgcatgtacagaatcgcaacgctaaaagagatcgtatttttgttagagtatataacgttatgaaacgaattaattgttttataaacaaaaatataaagaaatcgtccacagattccaattatcagttggcggtttttatgttaatggaaactatgttttttattagatttggtaaaatgaaatatcttaaggagaatgaaacagtagggttattaacactaaaaaataaacacatagaaataagtcccgatgaaatagttatcaagtttgtaggaaaggacaaagtttcacatgaatttgttgttcataagtctaatagactatataaaccgctattgaaactgacggatgattctagtcccgaagaatttctgttcaacaaactaagtgaacgaaaggtatacgaatgtatcaaacagtttggtattagaatcaaggatctccgaacgtatggagtcaattatacgtttttatataatttttggacaaatgtaaagtccatatctcctcttccgtcaccaaaaaagttaatagcattaactatcaaacaaactgctgaagtggtaggtcatactccatcaatttcaaaaagagcttatatggcaacgactattttagaaatggtaaaggataaaaattttttagatgtagtatctaaaactacgttcgatgaattcctatctatagtcgtagatcacgttaaatcatctacggatggatgatatagatctttacacaaataattacaagaccgataaatggaaatggataagcgtatgaaatctctcgcaatgacagctttcttcggagagctaagcacattagatattatggcattgataatgtctatatttaaacgccatccaaacaataccattttttcagtggataaggatggtcagtttatgattgatttcgaatacgataattataaggcttctcaatatttggatctgaccctcactccgatatctggagatgaatgcaagactcacgcatcgagtatagccgaacaattggcgtgtgcggatattattaaagaggatattagcgaatatatcaaaactactccccgtcttaaacgatttataaaaaaataccgcaatagatcagatactcgtatcagtcgagatacagaaaagcttaaaatagctctagctaaaggcatagattacgaatatataaaagacgcttgttaataagtaaatgaaaaaaaactagtcgtttataataaaacacgatatggatgccaacgtagtatcattttctactattgcgacgtatatagacgctttagcgaagaatgcttcggaattagaacagaggtctaccgcatacgaaataaataatgaattggaactagtatttattaagccgccattgattactttgacaaatgtagtgaatatctctacgattcaggaatcgtttattcgatttaccgttactaataaggaaggtgttaaaattagaactaagattccattatctaaggtacatggtctagatgtaaaaaatgtacagttagtagatgctatagataacatagtttgggaaaagaaatcattagtgacggaaaatcgtcttcacaaagaatgcttgttgagactatcgacagaggaacgtcatatatttttggattacaagaaatatggatcctctatccgactagaattagtcaatcttattcaagcaaaaacaaaaaactttacgatagactttaagctaaaatattttctaggatccggtgcccagtctaaaagttctttgttgcacgctattaatcatccaaagtcaaggcctaatacatctctggaaatagaattcacacctagagacaatgaaacagttccatatgatgaactaataaaggaattgacgactctctcgcgtcatatatttatggcttctccagagaatgtaattctttctccgcctattaacgcgcctataaaaacctttatgttgcctaaacaagatatagtaggtttggatctggaaaatctatatgccgtaactaagactgacggcattcctataactatcagagttacatcaaacgggttgtattgttattttacacatcttggttatattattagatatcctgttaagagaataatagattccgaagtagtagtctttggtgaggcagttaaggataagaactggaccgtatatctcattaagctaatagagcctgtgaatgcaatcaatgatagactagaagaaagtaagtatgttgaatctaaactagtggatatttgtgatcggatagtattcaagtcaaagaaatacgaaggtccgtttactacaactagtgaagtcgtcgatatgttatctacatatttaccaaagcaaccagaaggtgttattctgttctattcaaagggacctaaatctaacattgattttaaaattaaaaaggaaaatactatagaccaaactgcaaatgtagtatttaggtacatgtccagtgaaccaattatctttggagaatcgtctatctttgtagagtataagaaatttagcaacgataaaggctttcctaaagaatatggttctggtaagattgtgttatataacggcgttaattatctaaataatatctattgtttggaatatattaatacacataatgaagtgggtattaagtccgtggttgtacctattaagtttatagcagaattcttagttaatggagaaatacttaaacctagaattgataaaaccatgaaatatattaactcagaagattattatggaaatcaacataatatcatagtcgaacatttaagagatcaaagcatcaaaataggagatatctttaacgaggataaactatcggatgtgggacatcaatacgccaataatgataaatttagattaaatccagaagttagttattttacgaataaacgaactagaggaccgttgggaattttatcaaactacgtcaagactcttcttatttctatgtattgttccaaaacatttttagacgattccaacaaacgaaaggtattggcgattgattttggaaacggtgctgacctggaaaaatacttttatggagagattgcgttattggtagcgacggatccggatgctgatgctatagctagaggaaatgaaagatacaacaaattaaactctggaattaaaaccaagtactacaaatttgactacattcaggaaactattcgatccgatacatttgtctctagtgtcagagaagtattctattttggaaagtttaatatcatcgactggcagtttgctatccattattcttttcatccgagacattatgctaccgtcatgaataacttatccgaactaactgcttctggaggcaaggtattaatcactaccatggacggagacaaattatcaaaattaacagataaaaagacttttataattcataagaatttacctagtagcgaaaactatatgtctgtagaaaaaatagctgatgatagaatagtggtatataatccatcaacaatgtctactccaatgactgaatacattatcaaaaagaacgatatagtcagagtgtttaacgaatacggatttgttcttgtagataacgttgatttcgctacaattatagaacgaagtaaaaagtttattaatggcgcatctacaatggaagatagaccgtctacaaaaaactttttcgaactaaatagaggagccattaaatgtgaaggtttagatgtcgaagacttacttagttactatgttgtttatgtcttttctaagcggtaaataataatatggtatgggttctgatctcccagttctaaatgcattaaataattccaatagagcgatttttgttcctataggaccttccaactgtggatactctgtattgttaatagatatattaatacttttgtcgggtaacagaggttctacgtcttctaaaaataaaagttttataacatctggcctgttcataaataaaaacttggcgattctatatatactcttattatcaaatctagccattgtcttatagatgtgagctactgtaggtgtaccatttgattttctttctaatactatatatttctctcgaagaagttcttgcacatcatctgggaataaaatactactgttgagtaaatcagttattttttttatatcgatattgatggacatttttatagttaaggataataagtatcccaaagtcgataacgacgataacgaagtatttatacttttaggaaatcacaatgactttatcagattaaaattaacaaaattaaaggagcatgtatttttttctgaatatattgtgactccagatacatatggatctttatgcgtcgaattaaatgggtctagttttcagcacggcggtagatatatagaggtggaggaatttatagatgctggaagacaagttagatggtgttctacatccaatcatatatctaaagatatacccgaagatatgcacactgataaatttgtcatttatgatatttatacgtttgattcgttcaagaataaacgattggtattcgtacaggtacctccgtcgttaggagatgatagtcatttgactaatccgttattgtcaccgtattatcgtaattcagtagccagacaaatggtcaatgatatgatttttaatcaagattcatttttaaaatatttattagaacatctgattagaagccactatagagtttctaaacatataacaatagttagatacaaggataccgaagaattaaatctaacgagaatatgttataatagagataagtttaaggcgtttgtattcgcttggtttaacggcgtttcggaaaatgaaaaggtactagatacgtataaaaaggtatctaatttgatataatgaattcagtgactgtatcacacgcgccatatactattacttatcacgatgattgggaaccagtaatgagtcaattggtagagttttataacgaagtagccagttggctgctacgagacgagacgtcgcctattcctgataagttctttatacagttgaaacaaccgcttagaaataaacgagtatgtgtgtgtggtatagatccgtatccgaaagatggaactggtgtaccgttcgaatcaccaaattttacaaaaaaatcaattaaggagatagcttcatctatatctagattaaccggagtaattgattataaaggttataaccttaatataatagacggggttataccctggaattattacttaagttgtaaattaggagaaacaaaaagtcacgcgatttactgggataagatttccaagttactgctgcagcatataactaaacacgttagtgttctttattgtttgggtaaaacagatttctcgaatatacgggccaagttagaatccccggtaactaccatagtcggatatcatccagcggctagagaccgccaattcgagaaagatagatcatttgaaattatcaacgttttactggaattagacaacaaggcacctataaattgggctcaagggtttatttattaatgctttagtgaaattttaacttgtgttctaaatggatgcggctattagaggtaatgatgttatctttgttcttaagactataggtgtcccgtcagcgtgcagacaaaatgaagatccaagatttgtagaagcatttaaatgcgacgagttagaaagatatattgagaataatccagaatgtacactattcgaaagtcttagggatgaggaagcatactctatagtcagaattttcatggatgtagatttagacgcgtgtctagacgaaatagattatttaacggccattcaagattttattatcgaggtgtcaaactgtgtagctagattcgcgtttacagaatgcggcgccattcatgaaaatgtaataaaatccatgagatctaatttttcattgactaagtctacaaatagagataaaacaagttttcatattatctttttagatacgtataccactatggatacattgatagctatgaaacgaacactattagaattaagtagatcatctgaaaatccactaaccagatcgatagacactgccgtatataggagaaaaacaactcttcgggttgtaggtactaggaaaaatccaaattgcgacactattcatgtaatgcaaccaccgcatgataatatagaagattacctattcacttacgtggatatgaacaacaatagttattacttttctctacaacaacgattggaggatttagttcctgataagttatgggaaccagggtttatttcattcgaagacgctataaaaagagtttcaaaaatattcattaattctataataaactttaatgatctcgatgaaaataattttacaacggtaccactggtcatagattacgtaacaccttgtgcattatgtaaaaaacgatcgcataaacatccgcatcaactatcgttggaaaatggtgctattagaatttacaaaactggtaatccacatagttgtaaagttaaaattgttccgttggatggtaataaactgtttaatattgcacaaagaattttagacactaactctgttttattaaccgaacgaggagaccatatagtttggattaataattcatggaaatttaacagcgaagaacccttgataacaaaactaattttgtcaataagacatcaactacctaaggaatattcaagcgaattactctgtccaagaaaacgaaagactgtagaagctaacatacgagacatgttagtagattcagtggagaccgatacctatccggataaacttccgtttaaaaatggtgtattggacctggtagacggaatgttttactctggagatgatgctaaaaaatatacgtgtactgtatcaaccggatttaaatttgacgatacaaagttcgtcgaagacagtccagaaatggaagagttaatgaatatcattaacgatatccaaccattaacggatgaaaataagaaaaatagagagctatatgaaaaaacattatctagttgtttatgcggtgctaccaaaggatgtttaacattcttttttggagaaactgcaactggaaagtcgacaaccaaacgtttgttaaagtctgctatcggtgacctgtttgttgagacgggtcaaacaattttaacagatgtattggataaaggacctaatccatttatcgctaacatgcatttgaaaagatctgtattctgtagcgaactacctgattttgcctgtagtggatcaaagaaaattagatctgacaatattaaaaagttgacagaaccttgtgtcattggaagaccgtgtttctccaataaaattaataatagaaaccatgcgacaatcattatcgatactaattacaaacctgtttttgataggatagataacgcattaatgagaagaattgccgtcgtgcgattcagaacacacttttctcaaccttctggtagagaggctgctgaaaataatgacgcgtacgataaagtcaaactattagacgaggggttagatggtaaaatacaaaataatatatatagatttgcatttctatacttgttggtgaaatggtacaaaaaatatcatgttcctattatgaaactatatcctacacccgaagagattcctgactttgcattctatctcaaaataggtactctgttggtatctagctctgtaaagcatattccattaatgacggacctctccaaaaagggatatatattgtacgataatgtggtcactcttccgttgactactttccaacagaaaatatccaagtattttaattctagactatttggacacgatatagagagcttcatcaatagacataagaaatttgccaatgttagtgatgaatatctgcaatatatattcatagaggatatttcatctccgtaaatatatgctcatatatttatagaagatatcacatatctaaatgaataccggaatcatagatttatttgataatcatgttgatagtataccaactatattacctcatcagttagctactctagattatctagttagaactatcatagatgagaacagaagcgtgttattgttccatattatgggatcaggtaaaacaataatcgctttgttgttcgccttggtagcttccagatttaaaaaggtttacattctagtgccgaacatcaacatcttaaaaattttcaattataatatgggtgtagctatgaacttgtttaatgacgaattcatagctgagaatatctttattcattccacaacaagtttttattctcttaattataacgataacgtcattaattataacggattatctcgctacaataactctatttttatcgttgatgaggcacataatatctttgggaataatactggagaacttatgaccgtgataaaaaataaaaacaagattccttttttactattgtctggatctcccattactaacacacctaatactctgggtcatattatagatttaatgtccgaagagacgatagattttggtgaaattattagtcgtggtaagaaagtaattcagacacttcttaacgaacgcggtgtgaatgtacttaaggatttgcttaaaggaagaatatcatattacgaaatgcctgataaagatctaccaacgataagatatcacggacgtaagtttctagatactagagtagtatattgtcacatgtctaaacttcaagagagagattatatgattactagacgacagctatgttatcatgaaatgtttgataaaaatatgtataacgtgtcaatggcagtattgggacaacttaatctgatgaataatttagatactttatttcaggaacaggataaggaattgtacccaaatctgaaaataaataatggcgtgttatacggagaagaattggtaacgttaaacattagttccaaatttaaatactttattaatcggatacagacactcaacggaaaacattttatatacttttctaattctacatatggcggattggtaattaaatatatcatgctcagtaatggatattctgaatataatggttctcagggaactaatccacatatgataaacggcaaaccaaaaacatttgctatcgttactagtaaaatgaaatcgtctttagaggatctattagatgtgtataattctcctgaaaacgatgatggtagtcaattgatgtttttgttttcatcaaacattatgtccgaatcctatactctaaaagaggtaaggcatatttggtttatgactatcccagatactttttctcaatacaaccaaattcttggacgatctattagaaaattctcttacgccgatatttctgaaccagttaatgtatatcttttagccgccgtatattccgatttcaatgacgaagtgacgtcattaaacgattacacacaggatgaattaattaatgttttaccatttgacatcaaaaagctgttgtatctaaaatttaagacgaaagaaacgaatagaatatactctattcttcaagagatgtctgaaacgtattctcttccaccacatccatcaattgtaaaagttttattgggagaattggtcagacaatttttttataataattctcgtattaagtataacgataccaagttacttaaaatggttacatcagttataaaaaataaagaagacgctaggaattacatagatgatattgtaaacggtcacttctttgtatcgaataaagtatttgataaatctcttttatacaaatacgaaaacgatattattacagtaccgtttagactttcctacgaaccatttgtttggggagttaactttcgtaaagaatataacgtggtatcttctccataaaactgatgagatatataaagaaataaatgtcgagctttgttaccaatggatacctttccgttacattggaaccacacgagctgacgttagacataaaaactaatattaggaatgccgtatataagacgtatctccatagagaaattagtggtaaaatggccaagaaaatagaaattcgtgaagacgtggaattacctctcggcgaaatagttaataattctgtagttataaacgttccgtgtgtaataacctacgcgtattatcacgttggggatatagtcagaggaacattaaacatcgaagatgaatcaaatgtaactattcaatgtggagatttaatctgtaaactaagtagagattcgggtactgtatcatttagcgattcaaagtactgcttttttcgaaatggtaatgcgtatgacaatggcagcgaagtcactgccgttctaatggaggctcaacaaggtatcgaatctagttttgtttttctcgcgaatatcgtcgactcataaaaaagagaatagcggtaagtataaacacgaatactatggcaataattgcgaatgttttattctcttcgatatatttttgataatatgaaaaacatgtctctctcaaatcggacaaccatctcataaaatagttctcgcgcgctggagaggtagttgccgctcgtataatctctccagaataatatacttgcgtgtcgtcgttcaatttatacggatttctatagttctctgttatataatgcggtttgccctcatgattagacgacgacaatagtgttctaaatttagatagttgatcagaatgaatgtttattggcgttggaaaaattatccatacagcgtctgcagagtggttgatagttgttcctagatatgtaaaataatccaacttactaggcagcaaattgtctagataaaatactgaatcaaacggtgcagacgtattggcggatctaatggaatccaattgattaactatcttttgaaaatatacatttttatgatccaatacttgtaagaatatagaaataatgataagtccatcatcgtgtttttttgcctcttcataagaactatattttttcttattccaatgaacaagattaatctctccagagtatttgtacacatctatcaagtgattggatccataatcgtcttcctttccccaatatatatgtagtgatgataacacatattcattggggagaaaccctccacttatatatcctcctttaaaattaatccttactagttttccagtgttctggatagtggttggtttcgactcattataatgtatgtctaacggcttcaatcgcgcgttagaaattgcttttttagtttctatattaataggagatagttgttgcggcatagtaaaaatgaaatgataactgtttaaaaatagctcttagtatgggaattacaatggatgaggaagtgatatttgaaactcctagagaattaatatctattaaacgaataaaagatattccaagatcaaaagacacgcatgtgtttgctgcgtgtataacaagtgacggatatccgttaataggagctagaagaacttcattcgcgttccaggcgatattatctcaacaaaattcagattctatctttagagtatccactaaactattacggtttatgtactacaatgaactaagagaaatctttagacggttgagaaaaggttctatcaacaatatcgatcctcactttgaagagttaatattattgggtggtaaactagataaaaaggaatctattaaagattgtttaagaagagaattaaaagaggaaagtgatgaacgtataacagtaaaagaatttggaaatgtaattctaaaacttacaacacgggataaattatttaataaagtatatataagttattgcatggcgtgttttattaatcaatcgttggaggatttatcgcatactagtatttacaatgtagaaattagaaagattaaatcattaaatgattgtattaacgacgataaatacgaatatctgtcttatatttataatatgctagttaatagtaaatgaacttttacagatctagtataattagtcagattattaagtataatagacgactagctaagtctattatttgcgaggatgactctcaaattattacactcacggcattcgttaaccaatgcctatggtgtcataaacgagtatccgtgtccgctattttattaactactgataacaaaatattagtatgtaacagacgagatagttttctctattctgaaataattagaactagaaacatgtttagaaagaaacgattatttctgaattattccaattatttgaacaaacaggaaagaagtatactatcgtcatttttttctctagatccagctactactgataatgatagaatagacgctatttatccgggtggcatacccaaaaggggtgagaatgttccagagtgtttatccagggaaattaaagaagaagttaatatagacaattcttttgtattcatagacactcggttttttattcatggcatcatagaagataccattattaataaattttttgaggtaatcttctttgtcggaagaatatctctaacgagtgatcaaatcattgatacatttaaaagtaatcatgaaatcaaggatctaatatttttagatccgaattcaggtaatggactccaatacgaaattgcaaaatatgctctagatactgcaaaacttaaatgttacggccatagaggatgttattatgaatcattaaaaaaattaactgaggatgattgattaaaaaatataaattaatttaccatcgtgtatttttataacgggattgtccggcatatcatgtagatagttaccgtctacatcgtatactcgaccatctacgcctttaaatcctctatttattgacattaatctattagaattggaataccaaatattagtaccctcaattagtttattggtaatattttttttagacgatagatcgatggctcttgaaaccaaggttttccaaccggactcattgtcgatcggtgagaagtctttttcattagcatgaatccattctaatgatgtatgtttaaacactctaaacaattggacaaattcttttgatttgctttgaatgatttcaaataggtcttcgtctacagtaggcataccattagataatctagccattataaagtgcacgtttacatatctacgttctggaggagtaagaacgtgactattgagacgaatggctcttcctactatctgacgaagagacgcctcgttccatgtcatatctaaaatgaagatatcattaattgagaaaaaactaataccctcgcctccactagaagagaatacgcatgttttaatgcattctccgttagtgtttgattcttggttaaactcagccaccgccttgattctagtatcttttgttctagatgagaactctatattagagataccaaagactttgaaatatagtaataagatttctattcctgactgattaacaaatggttcaaagactagacatttaccatgggatgctaatattcccaaacatacatctataaatttgacgcttttctcttttaattcagtaaatagagagatatcagccgcactagcatcccctttcaatagttctccctttttaaaggtatctaatgcggatttagaaaactctctatctcttaatgaatttttaaaatcattatatagtgttgctatctcttgcgcgtattcgcccggatcacgattttgtctttcaggaaagctatcgaacgtaaacgtagtagccatacgtctcagaattctaaatgatgatatacctgtttttatttcagcgagtttagccttttgataaatttcttcttgctttttcgacatattaacgtatcgcattaatactgttttcttagcgaatgatgcagacccttctacgtcatcaaaaatagaaaactcgttattaactatatacgaacatagtcctcctagtttggagactaattctttttcatcgactagacgtttattctcaaatagcgattggtgttgtaaggatcctggtcgtagtaagttaaccaacatggtgaattcttgcacactattgacgataggtgtagccgataaacaaatcatcttatggttttttaacgcaatggtcttagataaaaaattatatactgaacgagtaggacggatcttaccatcttctttgattaatgatttagaaatgaagttatgacattcatcaataatgacgcatattctactcttggaattaatagttttgatattagtaaaaaatttatttctaaaattttgatcatcgtaattaataaaaatacaatccttcgttatctctggagcgtatctgagtatagtgttcatccaaggatcttctatcaaagcctttttcaccaataagataatagcccaattcgtataaatatccttaagatgtttgagaatatatacagtagtcattgttttaccgacacccgtttcatggaacaataaaagagaatgcatactgtctaatcctaagaaaactcttgctacaaaatgttgataatccttgaggcgtactacgtccgaccccatcatttcaacgggcatattagtagttctgcgtaaggcataatcgatataggccgcgtgtgatttactcatttatgagtgataagtaataactatgttttaaaaatcacagcagtagtttaactagtcttctctgatgtttgttttcgatactttttgaatcagaagtcatactagaataaagcaacgagtgaacgtaatagagagcttcgtatactctattcgaaaactctaagaacttattaatgaattccgtatccactggattgtttaaaatactaaattgaacactgttcacatccttccaagaagaagacttagtgacggacttaacatgagacataaataaatccaaattttttttacaaacatcactagccaccataatggcgctatctttcaaccagctatcgcttacgcattttagcagtctaacatttttaaagagactacaatatattctcatagtatcgattacacctctaccgaataaagttggaagtttaataatacaatatttttcgtttacaaaatcaaataatggtcgaaacacgtcgaaggttaacatcttataatcgctaatgtatagattgttttcagtgagatgattattagatttaatagcatctcgttcacgtttgaacagtttattgcgtgcgctgaggtcggcaactacggcgtccgctttagtactcctcccataatactttacgctattaatctttaaaatttcatagactttatctagatcgctttctggtaacatgatatcatgtgtaaaaagttttaacatgtcggtcggcattctatttagatcattaactctagaaatctgaagaaagtaattagctccgtattccagactaggtaatgggcttttacctagagacagattaagttctggcaatgtttcataaaatggaagaaggacatgcgttccctcccggatattttttacaatttcatccatttacaactctatagtttgttttcattattattagttattatctcccataatcttggtaatacttaccccttgatcgtaagataccttatacaggtcattacatacaactaccaattgtttttgtacataatagattggatggttgacatccatggtggaataaactactcgaacagatagtttatctttccccctagatacattagccgtaatagttgtcggcctaaagaatatctttggtgtaaagttaaaagttagggttcttgttccattattgctttttgtcagtagttcattataaattctcgagatgggtccgttctctgaatatagaacatcatttccaaatctaacttctagtctagaaataatatcggtcttattcttaaaatctattcccttgatgaagggatcgttaatgaacaaatccttggcctttgattcggctgatctattatctccgttatagacgttacgttgactagtccaaagacttacaggaatagatgtatcgatgatgttgatactatgtgatatgtgagcaaagattgttctcttagtggcatcactatatgttccagtaatggcggaaaactttttagaaatgttatatataaaagaattttttcgtgttccaaacattagcagattagtatgaagataaacactcatattatcaggaacattatcaatttttacatacacatcagcatcttgaatagaaacgataccatcttctggaacctctacgatctcggcagactccggataaccagtcggtgggccatcgctaacaataactagatcatccaacaatctactcacatatgcatctatataatctttttcatcttgtgagtaccctggatacgaaataaatttattatccgtatttccataataaggtttagtataaacagagagagatgttgccgcatgaacttcagttacagtcgccgttggttggtttatttgacctattactctcctaggtttctctataaacgatggtttaatttgtacattcttaaccatatatccaataaagctcaattcaggaacataaacaaattctttgttgaacgtttcaaagtcgaacgaagagtcacgaataacgatatcggatactggattgaaggttaccgttacggtaatttttgaatcggatagtttaagactgctgaatgtatcttccacatcaaacggagttttaatataaacgtatactgtagatggttctttaatagtgtcattaggagttaggccaatagaaatatcattaagttcactagaatatccagagtgtttcaaagcaattgtattattgatacaattattatataattcttcgccctcaatttcccaaataacaccgttacacgaagagatagatacgtgattaatacatttatatccaacatatggtacgtaactgaatcttcccatacctttaacttctggaagttccaaactcagaaccaaatgattaagcgcagtaatatactgatccctaatttcgaagctagcgatagcctgattgtctggaccatcgtttgtcataactccggatagagaaatatattgcggcatatacaaagttggaatttgactatcgactgcgaagacattagaccgtttaatagagtcatccccaccgatcaaagaattaatgatagtattattcattttctatttaaaatggaaaaagcttacaataaactccgtagagaaatatctataatttgtgagttttccttaaagtaacagcttccgtaaacgccgtctttatctcttagtaggtttattgtatttatgaccttttccttatcttcatagaatactaaaggcaacaaagaaatttttggttcttctctaagagctacgtgagacttaaccatagaagccaacgaatccctacatattttagaacagaaataccctacttcaccacccttgtatgtctcaatactaataggtctaaaaaccaaatcttgattacaaaaccaacacttatcaattacactatttgtcttaatagacacatctgccatagatttataatactttggtagtatacaagcgagtgcttcttctttagcgggcttaaagactgctttaggtgctgaaataaccacatctggaaggcttactcgcttagccatttaattacggaactatttttttatacttctaatgagcaagtagaaaacctctcatctacaaaaacgtactcgtgtccataatcctctaccatagttacacgttttttagatctcatatgtgctaaaaagttttcccatactaattggttactattatttttcgtataatttttaacagtttgaggttttagatttttagttacagaagtgatatcgaatattttatccaaaaagaatgaataattaattgtcttagaaggagtgttttcttggcaaaagaataccaagtgcttaaatatttctactacttcattaatcttttctgtactcagattcagtttctcatcttttacttgattgattatttcaaagactaacttataatcctttttatttattctctcgttagccttaagaaaactagatacaaaatttgcatctacatcatccgtggatatttgatttttttccatgatatccaagagttccgagataatttctccagaacattgatgagacaataatctccgcaatacatttctcaaatgaataagtttattagacacgtggaagtttgactttttttgtacctttgtacatttttgaaataccgactcgcaaaaaatacaatattcatatccttgttcagatactataccgttatgtctacaaccgctacataatcgtagattcatgttaacactctacgtatctcgtcgtccaatattttatataaaaacattttatttctagacgttgccagaaaatcctgtaatatttttagttttttgggctgtgaataaagtatcgccctaatattgttaccgtcttccgccaatatagtagttaaattatccgcacatgcagaagaacaccgcttaggcggattcagtacaatgttatatttttcgtaccaactcatttaaatatcataatctaaaatagttctgtaatatgtctagcgctaatatattgatcataatcctgtgcataaattaagatacaacaatgtctcgaaatcatcgacatggcttcttccatagttagaagatcgtcgtcaaagttagcaacgtgattcatcaacatttgctgttttgaggcagcaaatactgaaccgtcgccattcaaccattcataaaaaccatcgtctgaatccattgataatttcttgtactggtttttgagagctcgcatcaatctagcatttctagctcccggattgaaaacagaaagaggatcgtacatccagggtccattttctgtaaatagaatcgtataatgtcccttcaagaagatatcagacgatccacaatcaaagaattggtctccgagtttgtaacaaactgcggactttaacctatacatgataccgtttagcataatttctggtgatacgtcaatcggagtatcatctattagagatctaaagccggtgtaacattctccaccaaacatattcttattctgacgtcgttctacataaaacatcattgctccattaacgataacaggggaatgaacagcactacccatcacattagttcccaatggatcaatgtgtgtaactccagaacatcttccatagcctatgttaggaggagcgaacaccactcttccactattgccatcgaatgccatagaataaatatccttggaattgatagaaatcggactgtcggatgttgtgatcatcttcataggattaacaactatgtatggtgccgcctgaagtttcatatcgtaactgatgccgtttataggtctagccacagaaaccaacgtaggtctaaatccaactatagacaaaatagaagccaatatctgttcctcatctgtcataacttgagagcatccagtatgaataatcttcattagatggggatctaccgcatcatcatcgttacaataaaaaattcccattctaatgttcataattgcttttctaatcatggtatgcatgtttgctctctgaatctctgtggaaattagatctgatacacctgtaatcactatcggattatcctccgtaagacgattaaccaacaacatataattataagactttacttttctaaattcataaagttgctggattaggctataggtgtctccatgtacatacgcgttctcgagcgcaggaagtttaataccgaatagtgccatcagaataggatgaatatagtaattagtttctggttttctataaataaaagacaaatcttgtgaactagacatatcggtaaaatgcatggattggaatcgtgtagtcgacagaagaatatgatgattagatggagagtatattttatctaactctttgagttggtcaccgattctaggactagctcgagaatgaataagtactaaaggatgagtacatttcacagaaacactagcattgttcaatgtgctctttacatgggtaaggagttgaaatagctcgtttctatttgttctgacaatatttagtttattcataatgttaagcatatcctgaatagtaaagttagatgtgtcatacttgttagtagttagatatttagcaattgcattcccatcatttctcaatctcgtactccaatcatgcgtggatgctacttcgtcgatggaaaccatacaatcctttttgataggctgttgagattgatcatttcctgcacgtttaggtttggtacgttgatttctagcccctgcggatataaagtcatcgtctacaatttgggacaatgaattgcatacactacaagacaaagatttatcagaagtgtgaatatgatcttcatctaccaaagaaagagtttgattagtataactagattttagtcctgcgttagatgttaaaaaaacatcgctattgaccacggcttccattatttatattcgtagtttttactcgaaagcgtgattttaatatccaatcttattacttttggaatcgttcaaaacctttgactagttgtagaatttgatctattgccctacgcgtatactcccttgcatcatatacgttcgtcaccagatcgtttgtttcggcctgaagttggtgcatatctctttcaacattcgacatgagatccttaagggccatatcgtctagattttgttgagatgctgctcctggatttggattttgttgtgctgttgtacatactgtaccaccagtaggtgtaggagtacatacagtggccacaataggaggttgagaaagtgtaaccgttggagtagtacaagaaatacttccatccgattgttgtgtacatgtagttgttggtaacgtctgagaaggttgggtagatggcggcgtcgtcgttttttgatctttattaaatttagagataatatcctgaacagcattgctcggcgtcaacgctggaaggagtgaactcgccggcgcatcagtatcttcagacagccaatcaaaaagattagacatatcagatgatgtattagtttgttgtcgtggttttggtgtaggagcagtactactaggtagaagaataggagccgatgtagctgttggaaccggctgtggagttatatgaatagttggttgtagcggttggataggctgtctgctggcggccatcatattatctctagctagttgttctcgcaactgtctttgataatacgactcttgagactttagtcctatttcaatcgcttcatcctttttcgtatccggatccttttcttcagaataatagattgacgactttggtgtagaggattctgccagcctctgtgagaacttgttaaagaagtccatttaaggctttaaaattgaattgcgattataagattaaatggcagacacagacgatattatcgactatgaatccgatgatctcaccgaatacgaggatgatgaagaagaggaagaagatggagagtcactagaaactagtgatatagatcccaaatcttcttataagattgtagaatcagcatccactcatatagaagatgcgcattccaatcttaaacatatagggaatcatatatctgctcttaaacgacgctatactagacgtataagtctatttgaaatagcgggtataatagcagaaagctataacttgcttcaacgaggaagattacctctagtttcagaattttctgacgaaacgatgaagcaaaatatgctacatgtaattatacaagagatagaggagggttcttgtcctatagtcatcgaaaagaacggagaattgttgtcggtaaacgattttgacaaagatggtctaaaattccatctagactatattatcaaaatttggaaacttcaaaaacgatattagaatttatacgaatatcgttctctaaatgtcacaatcaagtctcgcatgttcagcaatttattgtcgtactttatatcgtgttcattaacgatatcttgcaaaatagtaatgattctatcttccttcgatagatattcttcagagattattgtcttatattctttcttgttatcagatatgaatttgataagactttgaacattattgatacccgtctgtttaattttttctacagatattttagttttggcagattctatcgtatctgtcaatagacatccaacatcgacattcgacgtcaattgtctataaatcaacgtataaattttagaaataacattagcgaattgttgtgcgttgatgtcgttattctgaaacagtatgattttaggtagcattttcttaacaaagagaacgtatttattgttactcagttgaacagatgatatatccagattactaacgcatctgattccgtataccaaactttcagaagaaatggtatacaattgtttgtattcattcaatgtctctttttcagaaattagtttagagtcgaatactgcaataattttcaagagatagttttcatcagataagattttatttagtgtagatatgataaaactattgttttgttggagaacttgatacgccgcgttctctgtagtcgacgctctcaaatgggaaacaatctccattatttttttggaatcggatactatatcttcggtatcttgacgcagtctagtatacatagagttaagagagattagagtttgtacattaagcaacatgtctctaaatgtggctacaaacttttcctttttcacatcatctagtttattatataccgatttcacaacggcaccagatttaaggaaccagaatgaaaaactctgataactacaatatttcatcatagttacgattttatcatcttctatagttggtgtaatagcgcatacctttttctccaagactggaaccaacgtcataaaaatgtttaaatcaaaatccatatcaacatctgatgcgctaagaccagtctcgcgttcaagattatctttactaatggtgacgaactcatcgtataaaactctaagtttgtccattatttatttacagatttagttgtttaatttatttgtgctcttccagagttgggatagtatttttctaacgtcggtattatattattaggatctacgttcatatgtatcataatattaatcatccacgttttgataaatctatctttagcttctgaaataacgtatttaaacaaaggagaaaaatatttagctacggcatcagacgcaataacattttttgtaaatgtaacgtatttagacgacagatcttcgttaaaaagttttccatctatgtagaatccatcggttgttaacaccattcccgcgtcagattgaataggagtttgaatagtttgttttggaaatagatccttcaataacttatagttgggtgggaaaaaatcgattttatcactagactctttcttttttactatcattacctcatgaactatttcttgaatgagtatatgtattttctttcctatatcggacgcgttcattggaaaatataccatgtcgttaactataagaatatttttatcctcgtttacaaactgaataatatcagatgtagttcgtaaacgaactatatcatcaccagcacaacatctaactatatgatatccactagtttcctttagccgtttattatcttgttccatattagcagtcattccatcatttaagaaggcgtcaaaaataatagggagaaatgacattttggattctgttacaactttaccaaaattaaggatatacggacttactatctttttctcaacgtcaatttgatgaacacacgatgaaaatgtgcttctatgagattgatcatgtagaaaacaacaagggatacaatatttccgcatatcatgaaatatattaagaaatcccaccttattatatttccccaaaggatccatgcacgtaaacattatgccgttatcattaataaagacttctttctcatcggatctgtaaaagttgttactgatttttttcattccaggatctagataattaataatgatgggttttctattcttattctttgtattttggcatatcctagaccagtaaacagtttccactttggtaaaatcagcagacttttgaacgctattaaacatggcattaatggcaataactaaaaatgtaaaatatttttctatgttaggaatatggtttttcactttaatagatatatggtttttggccaaaatgatagatatttttttatccgaggatagtaaaatattattagtcgccgtctctataaaaatgaagctagtctcgatatccaattttattctagaattgataggagtcgccaaatgtaccttatacgttatatctcccttgatgcgttccatttgtgtatctatatcggacacaagatctgtaaatagttttacgttattaatcatcacggtatcgccgtcgctagataacgctaatgtaccatccaagtcccaaatggagagatttaactgttcatcgtttagaataaaatgattaccggtcatattaataaagtgttcatcgtatctagataacaacgacttataattaatgtccaagtcttgaactcgctgaatgatcttttttaacccagttagttttagattggtacgaaatatattgttaaactttgattctacagtaatgtccaaatctagttgtggaaatacttccatcaacattgtttcaaacttgataatattattatctacatcttcgtacgatccaaattccggaatagatgtatcgcacgctctggccacccagataaccaaaaagtcacacgctccaggatatacattgtataaaaagctatcgttttttagtagggtttttttctgcgtgtatacgaagggattaaaaatagtattatcaacgtaactatattccaaattattcttatgagaatagataataatatcgtccttaatatctaacaaatttcctaaatatccctttaattgagtcattcgaagcgtcaatagaatatgtctcttaactatttccggctgttgtatatttaaatgacttcgtaaaaaataatatatgggcgacttctcatctatgtaatcatatggagtgagatatagggctcgttctacctcctgccccttacccacctgtaataccaattgcggacttactatatatcgcatatttatatcgtggggtaaagtgaaaatctactaccgatgatgtaagtcttacaatgttcgaaccagtaccagatcttaatttggaggcctccgtagaactaggggaggtaaatatagatcaaacaacacctatgataaaggagaatagcggttttatatcccgcagtagacgtctattcgcccatagatctaaggatgatgagagaaaactagcactacgattctttttacaaagactttattttttagatcatagagagattcattatttgttcagatgcgttgacgctgtaaaagacgtcactattaccaaaaaaaataacattatcgtggcgccttatatagcacttttaactatcgcatcaaaaggatgcaaacttacagaaacaatgattgaagcattctttccagaactatataatgaacatagtaagaaatttaaattcaactctcaagtatccatcatccaagaaaaactcggataccagtttggaaactatcacgtttatgattttgaaccgtattactctacagtagctctggctattcgagatgaacattcatctggcatttttaatatccgtcaagagagttatctggtaagttcattatctgaaataacatatagattttatctaattaatctaaaatctgatcttgttcaatggagtgctagtacgggcgctgtaattaatcaaatggtaaatactgtattgattacagtgtatgaaaagttacaactggtcatagaaaatgattcacaatttacatgttcattggctgtggaatcaaaacttccaataaaattacttaaagatagaaatgaattatttacaaaattcattaacgagttaaaaaagaccagttcattcaagataagcaaacgcgataaggatacgctactaaaatattttacttaggactggagttagaatttatagacgactcatttcgtttatcattgttactattattactattactatcattattagtgttggcattattagtattcttcttgtcatcttgttcagaaatatacagcaatgctatacctaatactaaatacattatcatgctcgcaatggctctaacaacaacgaaccaaaatgaatttggtcgtagcttttgttcacaaaaatacataaagaaatgtctacataaatctatggcgccattggctacttgaaatagcgccagtcctcctacagattttaatatagctgtataacatgacatttattcatcatcaaaagagacagagtcaccatctgtcatatttagattttttttcatgtgttcaaagtatcctctactcatttcattataatagtttatcatacttagaattttaggacggatcaatgagtaagacttgactagatcgtcagtagtaatttgtgcatcgtctattctgcatccgcttcgtcgaataatgtatagcatcgctttgagattctccatagctatcaagtctttatacaatgacatggaaatatctgtgaatactttatacttctccaacatcgatgccttaacatcatcgcctactttagcattgaaaatacgttctattgtgtagatggatgtagcaagatttttaaacaacaatgccatcttacacgatgattgcctcaagtctccaatcgtttgtttagaacgattagctacagagtccaatgcttggctgactagcatattattatctttagaaattgtattcttcaatgaggcgtttatcatatctgtgatttcgttagtcatattacagtctgactgggttgtaatgttatccaacatatcacctatggatacggtacacgtaccagcatttgtaataatcctatctaagatgttgtatggcattgcgcagaaaatatcttctcctgtaatatctccactctcgataaatctactcagattattcttaaatgccttattctctggagaaaagatatcagtgtccatcatttcattaatagtatacgcagaaaagataccacgagtatcaattctatccaagatacttatcggttccgagtcacagataatggtttcctctccttcgggagatcctgcatagaaatatctaggacaatagtttctatactgtctgtaactctgataatctctaaagtcactaactgataccatgaaattgagaagatcaaacgctgaagtaattaatttttctgcctcgtttttactacaactagttttcatcaatgtagtgacgatgtattgtttagttacttttggtctaatactgatgatagagatattattgcttcccataatggatcttctagtagtcaccttaaagcccattgatgcgaatagcagatagataaagtcttggtatgactcctttctaatatagtacggactacctttgtcacccaactttatacccacataagccataacaacctctttaatagccgtttcatgaggtttatcagccatgagcctgagtagttggaagaatctcatgaatcccgtctcagaaagtcctatatgcatgatagatttatctttcctgggaaactctcgtatagtcatagatgaaatactctttaaagtttctgaaataagattagtaacagtcttacctccgactactctaggtaacaaacaaactctaataggtgttttctctgcggagataatatcagaaaggatagagcaataagtagtattattgtgattataaagaccgaatacataacaggtagaatttataaacatcatgtcctgaaggtttttagacttgtattcctcgtaatccataccgtcccaaaacatggatttggtaactttgatagccgtagatctttgttccttcgccaacaggttaaagaaattaataaagaatttgttgtttctatttatgtccacaaattgcacgtttggaagcgccacggttacattcactgcagcattttgaggatcgcgagtatgaagtacgatgttattgtttactggtatatctggaaagaaatctaccagtctaggaataagagattgatatcgcatagaaatagtaaagtttataatctcatcatcgaagagcattttgttaccattgtaataaatatccactctgtcatatgtataaatgaagtactgttcaaacatgatgagatgtttatatgttggcatagtagtgagatcgacgtttggtaatggcaatgtattaagattaactccataatgtctagcagcatctgcgatgttataagcgtcgtcaaagcggggtcgatcttgtattgttatatattgtctaacacctataagattatcaaaatcttgtctgcttaatacaccgttaacaatttttgccttgaattcttttattggtgcattaataacatccttatagaggatgttaaacaaataagtgttatcaaagttaagatctggatatttcttttctgctagaacatccattgagtcggagccatctggtttaatataaccaccgataaatctagctctgtattctgtatccgtcaatctaatattaagaaggtgttgagtgaaaggtggaagatcgtaaaagctgtgagtattaatgataggattagtttccgaactaatgttaattggggtattaataatatctatatttccagcgttaagtgtaacattaaacagttttaattcacgtgacgtggtatcaattaaataattaatgcccaatttggatatagcagcctgaagctcatcttgtttagttacggatcctaatgagttattaagcaatatatcgaacggatgaacgaaggttgttttaagttggtcacatactttgtaatctagacatagatgcggaagaacggtagaaactatacgaaataaatattcagagtcctctaattgatcaagagtaactattgacttaataggcatcatttatttagtattaaatgacgaccgtaccagtgacggatatacaaaacgatttaattacagagttttcagaagataattatccatctaacaaaaattatgaaataactcttcgtcaaatgtctattctaactcacgttaacaacgtggtagatagagaacataatgccgccgtagtgtcatctccagaggaaatatcctcacaacttaatgaagatctatttccagatgatgattcaccggccactattatcgaacgagtacaacctcatactactattattgacgatactccacctcctacgtttcgtagagagttattaatatcggaacaacgtcaacaacgagaaaaaagatttaatattacagtatcgaaaaatgctgaagcaataatggaatctagatctatgataacttctatgccaacacaaacaccatccttgggagtagtttatgataaagataaaagaattcagatgttagaggatgaagtggttaatcttagaaatcaacgatctaatacaaaatcatctgataatttagataattttaccaaaatactatttggtaagactccgtacaaatcaacagaagttaataagcgtatagccatcgttaattatgcaaatttgaacgggtcccccttatcagtcgaggacttggatgtttgttcggaggatgaaatagatagaatctataaaacgattaaacaatatcacgaaagtagaaaacgaaaaattatcgtcactaacgtgattattattgtcataaacattatcgagcaggcattgctaaaactcggatttgaagaaatcaaaggactgagtaccgatatcacttcagaaattatcgatgtggagatcggagatgactgcgatgctgtagcatctaaactaggaatcggtaacagtccggttcttaatattgtattgtttatactcaagatattcgttaaacgaattaaaattatttaatttaatacattcccatatccagacaacaatcgtctggattaatctgttcctgtcgtctcataccggacgacatattaatctttttattagtgggcatctttttagatggtttctttttcccagcattaactgagtcgatacctagaagatcgtgattgatctctccgaccattccacgaacttctaattggccgtctctgacggtaccataaactattttaccagcattagtaacagcttggacaatctgaccatccatcgcattgtacgatgtagtagtaactgttgttctacgtctaggagcaccagaagtatttttggagcccttggatgttgatgtagaagaagacgaggattttgattttggtttacatgtaatacattttgaactctttgattttgtatcacatgcgccggcagtcacatctgtttgagaattaagattattgttgcctcctttgacggctgcatctccaccgatttgcgctagtagatttttaagctgtggtgtaatcttattaactgtttcgatataatcatcgtaactgcttctaacggctaaattttttttatccgccatttagaagctaaaaatatttttatttatgcagaagatttaactagattatacaatgaactaatatgatccttttccagattatttacaaacttggtattttttggttctggaggaggcgaatttaaattcggacttggattcggattttgtaagttcttgatcttattatacatcgagtataggatggcgacagtaactgctacacaaataccgatcaaaagaagaataccaatcatttattgacaataacttcactattgatcaagtatgcaatatatcatcttttcactaaataagtagtaataatgattcaacaatgtcgagatatatggacgataataatttagttcatggaaatatcgctatgattggtgtgaatgactccgctaactctgtggggtgcgcagtgctttccccacatagaataaattagcattccgactgtgataataataccaagtataaacgccataatactcaatactttccatgtacgagtgggactggtagacttactaaagtcaataaaggcgaagatacacgaaagaatcaaaagaatgattccagcgattagcacgccggaaaaataatttccaatcataagcatcatgtccatttaactaataaaaattttaaatcgccgaatgaacaaagtggaatataaaccatataaaaacaatagtttgtactgcaaaaataatatctatttttgttttcgaagatatggtaaaattaaatagtagtacacagcatgttataactaacagcagcaacggctcgtaattacttatcatttactagacgaaaaggtggtgggatattttcttgctcaaataatacgaatatatcacccatccattttatgcgatgtttatatactctaatctttaatagatctatagacgacgggtttaccaacaatatagattttatcgattcatctaatttaaacccttccttaaacgtgaatgatctattatctggcataacgatgaccctacctgatgaatcggacaatgtactgggccatgtagaataaattatcaacgaattatcgtctacgaacatttatatcatttgttttaattttaggacgcgaataaatggatataaaatagaaaataacagatattacaaccagtgttatggccgcgcccaaccaggtaggcagttttattttatcttttactacaggttctcctggatgtacgtcaccaacggcggacgtagttctagtacaattagacgtaagttccgcttgggaattttttaacgctaaagagttaacgttaatcgtgcacccaacgtatttacatctagttcgttgaacatcttgattataatataaccattttctatctctagattcgtcagtgcactcatgtaaccaacataccctaggtcctaaatatttatctccggaattagattttggataattcgcgcaccaacaatttctatttcctttatgatcgttacaaaagacgtataatgccgtatccccaaaagtaaaataatcaggacgaataattctaataaactcagaacaatatctcgcatccatatgtttggagcaaatatcggaataagtagacatagccggtttccgttttgcacgtaaccattctaaacaattggggtttccaggatcgtttctacaaaatccagtcatgaaatcgtcacaatgttctgtcttgtaattattattaaatatttttggacagtgtttggtatttgtcttagaacaacattttgccacgctatcactatcgcccaggagataatccttttttataaaatgacatcgttgcccggatgctatataatcagtagcgtgttttaaatccttaatatattcaggagttacctcgttctgataatagattaatgatccaggacgaaatttgaaagaactacatggttctccatgaattaatacatattgtttagcaaattcaggaactataaaactactacaatgatctatcgacataccatctatcaaacaaaacttgggtttaatttctcccggagatgtttcataatagtacgtataactttcttctgcaaacttaacagctctattatattcaggataattaaaacctaattccatatatttgtctcgtatatctgctattcctggtgctattttgattctattaagagtaacagctgcccccattcttaataatcgtcagtatttaaactgttaaatgttggtatatcaacatctaccttatttcccgcagtataaggtttgttgcaggtatactgttcaggaatggttacatttatacttcttctatagtcctgtctttcgatgttcatcacatatgcaaagaacagaataaacaaaataatgtaagaaataatattaaatatctgtgaattcgtaaatacattgattgccataataattacagcagctacaatacacacaatagacattcccacagtgttgccattacctccacgatacatttgagttactaagcaataggtaataactaagctagtaagaggcaatagaaaagatgagataaatatcatcaatatagagattagaggagggctatatagagccaagacgaacaaaatcaaaccgagtaacgttctaacatcattatttttgaagattcccaaataatcattcattcctccataatcgttttgcatcatacctccatctttaggcataaacgattgctgctgttcctctgtaaataaatctttatcaagcactccagcacccgcagagaagtcgtcaagcatattgtaatatcttaaataactcatttatatattaaaaaatgtcactattaaagatggagtataatctttatgccgaactaaaaaaaatgacttgtggtcaacccctaagtctttttaacgaagacggggatttcgtagaagttgaaccgggatcatcctttaagtttctgatacctaagggattttacgcctctccttccgtaaagacgagtctagtattcgagacattaacaacgaccgataataaaatcactagtatcaatccaacaaatgcgccaaagttatatcctcttcaacgcaaagtcgtatctgaagtagtttctaatatgaggaaaatgatcgaatcaaaacgtcctctatacatcactcttcacttggcgtgtggatttggtaagactattaccacgtgttatcttatggctacacacggtagaaaaaccgtcatttgcgtacccaataaaatgttaatacatcaatggaagacacaggtagaggcagtcggattggaacataagatatccatagatggagtaagtagtctattaaaggaactaaagactcaaagtccggatgtattaatagtagtcagtagacatctgacaaacgatgccttttgtaaatatatcaataagcattatgatttgttcatcttggatgaatcacatacgtataatctgatgaacaatacagcagttacaagatttttagcgtattatcctccgatgatgtgttattttttaactgctacacctagaccatctaaccgaatttattgtaacagtattattaatattgccaagttatccaatctaaaaaaaactatctatgcagtagatagtttttttgagccatattccacagataatattagacatatggtaaaacgactagatggaccatctaataaatatcatatatataccgagaagttattatctgtagacgagcctagaaatcaacttattcttgataccctggtagaagaattcaagtcaggaactattaatcgcattttagttattactaaactacgtgaacatatggtattattctacaaacgattattagattttttcggaccagaggttgtatttataggagacgcccaaaatagacgtactccagatatggtcaaatcaatcaaggaactaaatagatttatattcgtatccaccttattttattccggtactggtttagatattcctagtttggattcgttgttcatttgctcggcagtaatcaacaatatgcaaatagagcaattactagggagggtatgtcgagaaacagaactattagataggacggtatatgtatttcctaacacatccatcaaagaaataaagtacatgataggaaatttcatgcaacgaattattagtctgtctgtagataaactaggatttaaacaaaaaagttatcggaaacatcaagaatccgatcccacttctgcatgtacaacatcatccagagaagaacgtgtattaaatagaatatttaactcgcaaaatcgttaagaagtttaagcgacgatccgcatgctgcgcaggccagtgtattacccctcatagtattaatataatccaatgatacttttgtgatgtcggaaatcttaaccaatttagactgacaggcagaacacgtcatgcaatcatcatcgtcatcgataactgtagtcttgggcttctttttgcgactcttcattccggaacgcacattggtgctatccatttaggtagtaaaaaataagtcagaatatgccctataacacgatcgtgcaaaacctggtatatcgtctctatctttatcacaatatagtgtatcgacatttttattattattgacctcgtttatcttggaacatggaatgggaacatttttgttatcaacggccatctttgccttaattccagatgttgtaaaattataactaaacagtctatcatcgacacaaatgaaattcttgtttagacgtttgtagtttacgtatgcggctcgttcgcgtctcattttttcagatattgcaggtactataatattaaaaataagaatgaaataacataggattaaaaataaagttatcatgacttctagcgctgatttaactaacttaaaagaattacttagtctgtacaaaagtttgagattttcagattctgcggctatagaaaagtataattctttggtagaatggggaacatctacttactggaaaataggcgtgcaaaaggtagctaatgtcgagacgtcaatatctgattattatgatgaggtaaaaaataaaccgtttaatattgatccgggctattacattttcttaccggtatattttgggagcgtctttatttattcgaagggtaaaaatatggtagaacttggatctggaaactcttttcaaataccagatgatatgcgaagtgcgtgtaacaaagtattagacagcgataacggaatagactttctgagatttgttttgttaaacaatagatggataatggaagatgctatatcaaaatatcagtctccagttaatatatttaaactagctagtgagtacggattaaacatacccaaatatttagaaattgaaatagaggaagacacattatttgacgacgagttatactctattatagaacgctctttcgatgataaatttccaaaaatatccatatcgtatattaagttgggagaacttagacggcaagttgtagactttttcaaattctcattcatgtatattgagtccatcaaggtagatcgtataggagataatatttttattcctagcgttataacaaaatcaggaaaaaagatattagtaaaagatgtagaccatttaatacgatccaaggttagagaacatacatttgtaaaagtaaaaaagaaaaacacattttccattttatacgactatgatggaaacggaacagaaactagaggagaagtaataaaacgaattatagacactataggacgagactattatgttaacggaaagtatttctctaaggttggtagtgcaggcttaaagcaattgactaataaattagatattaatgagtgcgcaactgtcgatgagttagttgatgagattaataaatccggaactgtaaaacgaaaaataaaaaaccaatcagcatttgatttaagcagagaatgtttgggatatccagaagcggattttataacgttagttaataacatgcggttcaaaatagaaaattgtaaggttgtaaatttcaatattgaaaatactaattgtttaaataacccgagtattgaaactatatatggaaactttaaccagttcgtctcaatctttaatgtcgtcaccgatgtcaaaaaaagattattcgagtgaaataatatgcgcctttgatataggtgcaaaaaatcctgccagaactgttttagaagtcaaggataactccgttagggtattggatatatcaaaattagactggagttctgattgggaaaggcgcatagctaaagatttgtcacaatatgaatacactacagttcttctagaacgtcagcctagaaggtcgccgtatgttaaatttatctattttattaaaggctttttatatcatacatcggctgccaaagttatttgcgtctcgcctgtcatgtctggtaattcatatagagatcgaaaaaagagatcggtcgaagcatttcttgattggatggacacattcggattgcgagactccgttccggatagacgcaaattagacgatgtagcggatagtttcaatttggctatgagatacgtattagataaatggaatactaattatacaccttataataggtgtaaatctagaaattacataaaaaaaatgtaataacgttagtaacgccattatggataatctatttacctttctacatgaaatagaagatagatatgccagaactatttttaactttcatctaataagttgcgatgaaataggagatatatatggtcttatgaaagaacgcatttcctcagaggatatgtttgataatatagtgtataataaagatatacatcctgccattaagaaactagtgtattgcgacatccaacttactaaacacattattaatcagaatacgtatccggtatttaacgattcttcacaagtgaaatgttgtcattatttcgacataaactcagataatagcaatattagctctcgtacagtagagatatttgagagggaaaagtcatctcttgtatcatatattaaaactaccaataagaagagaaaggtcaattacggcgaaataaagaaaactgttcatggaggcactaatgcaaattacttttccggtaaaaagtctgacgagtatctgagtactacagttagatccaacattaatcaaccttggatcaaaaccatctctaagaggatgagagttgatatcattaatcactctatagtaacgcgtggaaaaagctctatattacaaactatagaaattatttttactaatagaacatgtgtgaaaatattcaaggattctactatgcacattattctatccaaggacaaggatgaaaaggggtgtatacacatgattgacaaattattctatgtctattataatttatttctgttgttcgaagatatcatccaaaacgagtactttaaagaagtagctaatgttgtaaaccacgtactcacggctacggcattagatgagaaattattcctaattaagaaaatggctgaacacgatgtttatggagttagcaatttcaaaatagggatgtttaacctgacatttattaagtcgttggatcataccgttttcccctctctgttagatgaggatagcaaaataaagttttttaaggggaaaaagctcaatattgtagcattacgatctctggaggattgtataaattacgtgactaaatccgagaatatgatagaaatgatgaaggaaagatcgactattttaaatagcatagatatagaaacggaatcggtagatcgtctaaaagaattgcttctaaaatgaaaaaaaacactaattcagaaatggatcaacgactagggtataagtttttggtgcctgatcctaaagccggagttttttatagaccgttacatttccaatatgtatcgtattctaattttatattgcatcgattgcatgaaatcttgaccgtcaagcggccactcttatcgtttaagaataatacagaacgaattatgatagaaattagcaatgttaaagtgactcctccagattactcacctataatcgcgagtattaaaggtaagagttatgacgcattagccacgttcactgtaaatatctttaaagaggtaatgaccaaagagggtatatccatcactaaaataagtagttatgagggaaaagattctcatttgataaaaattccgctactaataggatacgggaataaaaatccacttgatacagccaagtatcttgttcctaatgtcataggtggagtctttatcaataaacaatctgtcgaaaaagtaggaattaatctagtagaaaagattacaacatggccaaaatttagggttgttaagccaaactcattcactttctcgttttcctccgtatcccctcctaatgtattaccgacaagatatcgccattacaagatatctctggatatatcacaattggaagcgttgaatatatcatcgacaaagacatttataacggtcaatattgttttgctgtctcaatatttatctagagtgagtctagaattcattagacgtagtttatcatacgatatgcctccagaagttgtctatctagtaaacgcgataatagatagtgctaaacgaattactgaatctattactgactttaatattgatacatacattaatgacctggtggaagctgaacacattaaacaaaaatctcagttaacgatcaacgagttcaaatatgaaatgctgcataactttttacctcatatgaactatacacccgatcaactaaagggattttatatgatatctttactaagaaagtttctctactgtatcttccacacttctagatatccagatagagattcgatggtttgtcatcgcatcctaacgtacggcaaatattttgagacgttggcacatgatgaattagagaattacataggcaacatccgaaacgatatcatgaacaatcacaagaacagaggcacttacgcggtaaacattcatgtactaacaactcccggacttaatcacgcgttttctagcttattgagtggaaagttcaaaaagtcagacggtagttatcgaacacatcctcactattcatggatgcagaatatttctattcctaggagtgttggattttatccggatcaagtaaagatttcaaagatgttttctgtcagaaaataccatccaagtcaatatctttacttttgttcatcagacgttccggaaagaggtcctcaggtaggtttagtatctcaattgtctgtcttgagttccattacaaatatactaacgtctgagtatttggatttggaaaagaaaatttgtgagtatatcagatcatattataaagatgatataagttactttgaaacaggatttccaatcactatagaaaatgctctagtcgcatctcttaatccaaatatgatatgtgattttgtaactgactttagacgtagaaaacggatgggattcttcggtaacttggaggtaggtattactttagttagggatcacatgaatgaaattcgcattaatattggagcgggaagattagtcagaccattcttggttgtggataacggagagctcatgatggatgtgtgtccggagttagaaagcagattagacgacatgacattctctgacattcagaaagagtttccgcatgtcatcgaaatggtagatatagaacaatttacttttagtaacgtatgtgaatcggttcaaaaatttagaatgatgtcaaaggatgaaagaaagcaatacgatttatgtgactttcctgccgaatttagagatggatatgtagcatcttcattagtgggaatcaatcacaattctggacccagagctattcttggatgtgctcaagctaaacaagctatctcttgtctgagctcggatatacgaaataaaatagacaatggaattcatttgatgtatccagagaggccaatcgtgattagtaaggctttagaaacttcaaagattgcggctaattgcttcggccaacatgttactatagcattaatgtcgtacaaaggtatcaatcaagaggatggaattatcatcaaaaaacaatttattcagagaggcggtctcgatattgttacagccaagaaacatcaagtagaaattccattggaaaactttaataacaaagaaagagataggtctaacgcctattcaaaattagaaagtaatggattagttagactgaatgctttcttggaatccggagacgctatggcacgaaatatctcatcaagaactcttgaagatgattttgctagagataatcagattagcttcgatgtttccgagaaatataccgatatgtacaaatctcgcgttgaacgagtacaagtagaacttactgacaaagttaaggtacgagtattaaccatgaaagaaagaagacccattctaggagacaaatttaccactagaacgagtcaaaagggaacagtcgcgtatgtcgcggatgaaacggaacttccatacgacgaaaatggtatcacaccagatgtcattattaattctacatccatcttctctagaaaaactatatctatgttgatagaagttattttaacagccgcatattctgctaagccgtacaacaataagggagaaaaccgacctgtctgttttcctagtagtaacgaaacatccatcgatacatatatgcaattcgctaaacaatgttatgagcattcaaatccgaaattgtccgatgaagaattatcggataaaatcttttgtgaaaagattctctatgatcctgaaacggataagccttatgcatccaaagtattttttggaccaatttattacttgcgtctgaggcatttaactcaggacaaggcaaccgttagatgtagaggtaaaaagacgaagctcattagacaggcgaatgagggacgaaaacgtggaggaggtatcaagttcggagaaatggagagagactgtttaatagcgcatggtgcagccaatactattacagaagttttgaaagattcggaagaagattatcaagatgtgtatgtttgtgaaaattgtggagacatagcagcacaaatcaagggtattaatacatgtcttagatgttcaaaacttaatctctctcctctcttaacaaaaattgataccacgcacgtatctaaagtatttcttactcaaatgaacgccagaggcgtaaaagtcaaattagatttcgaacgaaggcctccttcgttttataaaccattagataaagttgatctcaagccgtcttttctggtgtaatattctagtttggtagtagatacatatcaatatcatcaaattcgagatccgaattataaaatgggcgtggattgttaactatagaatcggacgtctgatattcgaaaatctgtggagtttcaggttttggtggaggtgtaactgctacttgggatactgaagtctgatattcagaaagctgtggatgttctggttcggcatccaccgatggtgtcacatcactaatcggttcggtaacgtctgtggatggaggtgctacttctacagaacctgtagcctcagttgtcaacggagatacatttttaatgcgagaaaatgtataatttggtaatggtttcttatgtggatctgaagaagaggtaagatatctactagaaagataccgatcacgttctagttctcttttgtagaacttaactttttctttctccgcatctagttgatattccaacctcttcacgttactacgttcagattccaattcacgttcgcatgggttacctccgcagtttttacgagcgatttcacgttcagccttcatgcgtctctccctctctctatcgagtttatcagagcagtctttctgaaggcgatcgaactccataaatttctccaacgctttgattgtttccatagatttccgaagttcagcttttaggactgtgattctttttctttcgaattcacagctggatgtacaaccgtttccattaccgccatctctaagtttcttttctagatcggcaacatttcatccccatgccttttacattcctcgagtctactgtcgtcgaaatatcgttccagctccttttcgacatcaataactttagcacgttgtctctcaagctctcttttgtagttatctgattccctggcacgtttaagatcttcatgcaattgagtcagctcttaacttcctctcttgcttcttcgtcatagtacgcgcaatcactgtgagatccattgttaccacgtctacactcggcgagctcgcgtttaagagattcaatttcccgtttgtattggtccatgtttccattgctaccaccattagatttacaggctgctagttgtcgttcgagatcagaaatacgggttttcttggaattgatttcgtcgatgtacttggcatcgaaacacttattaagttctttttccaattctacgattttatttctttcgcgagtcaattccctcctgtagtaactatctgttttgtcagattcacgctctctacgtagactttcttgcaagttactaatttgttccctagcacgtccgagtttagttttatatgctgaatagagttctgattcatcctttgagcagatctctagcgatcgtttaagattcctaattctagtctttagcctatttacctcctcagaagatgttccgttaccgttgcgtttacactcgttaagctgtctatcaagatccatgattctatctctaagacgttgcatctctctttccatatcagcattgctttcattattacgtctgcagtcactcaactgtctttcaatatctgagattctatctctaagacgtcgcatctctctctgtttcggcattggtttcattattacgtttacagtcgttcaactgtctttcaagatctgatattctagattggagtctgctaatctctgtagcattttcacggcattcactcagttgtctttcaagatctgaaattttagattggagtctgctaatctctgtaagatttcctcctccgctctcgatgcagtcggtcaacttattctctagttctctaatacgcgaacgcagtgcatcaacttcttgcgtgtcttcctggttgcgtgtacattcatcgagatctctaacgcgtcgtcgttcttcctcaagttctctgcgtactacagaaagcgtgtccctatcttgttgatatttagcaatttctgattctagagtactgattttgcttacgtagttactaatagttgtcttggccttatcaagatcctccttgtatttgtcgcattccttgatatccctacgaagtctggacagttcccattcgacattacgacgtttatcgatttcagctcggagatcgtcatcgcgttgttttagccacatacgactgagttcaagttctcgttgacaagatccatctacttttccattcctaatagtatccagttccttttctagttctgaacgcatttctcgttccctatcaagcgattctctcaattctcggatagtcttcttatcaatttctaataaatctgaaccatcatctgtcccattttgaatatccctgtgttctttgatctcttttgtaagtcggtcgattctttcggttttataaacagaatccctttccaaagtcctaatcttactgagtttatcactaagttctgcattcaattcggtgagttttctcttggcttcttccaactctgttttaaactctccactatttccgcattcttcctcgcatttatctaaccattcaattagtttattaataactagttggtaatcagcgattcctatagccgttcttgtaattgtgggaacataattaggatcttctaatggattgtatggcttgatagcatcatctttatcattattagggggatggacaaccttaattggttggtcctcatctcctccagtagcgtgtggttcttcaataccagtgttagtaataggcttaggcaaatgcttgtcgtacgcgggcacttcctcatccatcaagtatttataatcgggttctacttcagaatattcttttctaagagacgcgacttcgggagttagtagaagaactctgtttctgtatctatcaacgctggaatcaatactcaagttaaggatagcgaatacctcatcgtcatcatccgtatcttctgaaacaccatcatatgacatttcatgaagtctaacgtattgataaatagaatcagatttagtattaaacagatccttaacctttttagtaaacgcatatgtatattttagatctccagatttcataatatgatcacatgccttaaatgtcagtgcttccatgatataatctggaacactaatgggtgacgaaaaagatacagcaccatatgctacgttgataaataaatctgaaccactaagtagataatgattaatgttaagaaagaggaaatattcagtgtataggtatgtcttggcgtcatatcttgtactaaacacgctaaacagtttgttaatgtgatcaatttccaatagattaattagagcagcgggaataccaacaaacatattaccacatccgtattttctatgaatatcacatatcatgttaaaaaatcttgatagaagagcgaatatctcgtctgacttaatgagtcgtagttcagcagcaacataagtcataactgtaaatagaacatactttcctgtagtgttgattctagactccacatcaacaccattattaaaaatagttttatatacatctttaatctgctctccgttaatcgtcgaacgttctagtatacggaaacactttgatttcttatctgtagttaatgacttagtgatatcacgaagaatattacgaattacatttcttgtttttcttgagagacctgattcagaactcaactcatcgttccatagtttttctacctcagtggcgaaatctttggagtgcttggtacatttttcaataaggttcgtgacctccatttattataaaaaatttattcaaaacttaactacaatcgggtaattataagatcgtagatctcccatgtggcggaatactaccatctatcgcatgtggatggacagtaggtaatggccatgggaacagtaatgtttgcatatttatctttcttgctagtattactgcatattgtcccaatgtttcgatgtgatgttctaacctatcaactgccgctgtatcacaacaatagtgtccgatgaaattaagattatgatccaatgtgtttaatatatgattatcaagtcttatacgatccgcgtcttttttgacaggatcaggttcttctacaggaagaagtttcggcctcttatgatattcatgtctgggaaacggtggtctagggtgaggctccggtatcggagtgggttttggattataatcatcatcgtctatgacatcatcttcgacttcgatatttattttgctatcttgatgatgtcctgtatcagttgcattttcagcactcgactgaatattagcgcattcattgtctattattaccatatttctaaacccaaaatgtatgtgttgaacatcagtactatcgttgatgagtcttatagcatgaattcgcttatcgttatcgggtttatcttctgtcaccttagcaattccttttttattaaactctacataatcatatccatttctattgtttgttctaatataaacgagtatagcatcattgctaaatttttcaatagtatcaaaaacagaatatcctaaaccatataatatatattcaggaacactcaaactaaatgtccaggattctcctaaatacgtaaactttaatagtgcgaaatcattcaaaaatctaccacttatagatagatagtacataaatgcgtatagtagtctacctatctctttattatgaaaaccggcattacgatcatatatgtcgtgatatacctgtgatccgtttacgttaaaccataaatacatgggtgatcctataaacatgaatttatttctaattctcagagctatagttaattgaccgtgtaatatttgcttacatgcatacttgatacgcttattaataagatttttatcattgctcgttatttcagaatcgtatatataaggagtaccatcgtgattcttaccagatattatacaaaatactatatataaaatatattgacccacgttagtaatcatataaatgtttaacgttttaaattttgtattcaatgatccattatcatacgctatcatggtcttgtaatattcattctttaaaatataatattgtgttagccattgcattggagctcctaatggagattttctattctcatccattttaggataggctttcataaagtccctaataacttcgtgaataatgtttctatgttttctactgatgcatgtatttgcttcgatttttttatcccatgtttcatctatcatagatttaaacgcagtaatgctcgcaacattaacatcttgaaccgttggtacaattccgttccataaatttataatgttcgccatttatataactcattttttgaatatacttttaattaacaaaagagttaagttactcatatggacgccgtccagtctgaacatcaatctttttagccagagatatcatagccgctcttagagtttcagcgtgattttccaacctaaatagaacttcatcgttgcgtttacaacacttttctatttgttcaaactttgttgttacattagtaatctttttttccaaattagttagccgttgtttgagagtttcctcattgtcgtcttcatcggctttaacaattgcttcgcgtttagcctctggctttttagcagcctttgtagaaaaaaattcagttgctggaattgcaagatcgtcatctccggggaaaagagttccgtccatttaaagtacagattttagaaactgacactctgcgttatttatatttggtacaacacatggattataaatattgatgttaataacatcagaaaatgtaaagtctatacattgttgcatcgtgttaaattttctaatggatctagtattattgggtccaacttctgcctgaaatccaaatatggaagcggatacaaaaccgtttcctggataaaccacacatctccacttttgctttacatcagaaattgtgtcgttgacatcttgaactctcctatctaatgccggtgttccacctatagattttgaatattcgaatgctgcatgagtagcattaaattccttaatattgccataattttcatatattgagtaaccctggataaaaagtaaacacaccgcagccgtcgctaccacaataaaaaaaattgatagagagttcatttataatctattagaagctgacaaaatttttttacacgcatcagacaatgctttaataaatagttcaacatctacttttgtcatatcgaaccgatggtatgattctaacctagaattacatccgaaaaagttgactatgttcatagtcattaagtcattaacaaacaacattccagactctggattataagacgatactgtttcgtcacaattacctaccttaatcatgtgattatgaatattggctattagagcaccttctaagaaatctataatatctttgaaacacgatttaaaatcaaaccacgaatatacttctacgaagaaagttagtttacccataggagaaataactataaatggagatctaaatacaaaatccggatctatgatagttttaacattattatattctctattaaatacctccacatctaaaaatgttaattttgaaactatgtcttcgtttattaccgtacctgaactaaacgctataagctctattgtttgagaactctttaaacgatattcttgaaatacatgtaacaaagtttcctttaactcggtcggtttatctaccatagttacagaatttgtatccttatctataatataataatcaaaatcgtataaagttatataattatcgcgttcagattgtgatcttttcaaatagactaaaaaccccatttctctagtaagtatcttatgtatatgtttgtaaaatatcttcatggtgggaatatgctctaccgcagttagccattcctcattgacagcggtagatgtattagacaaaactattccaatgtttaacaagggccattttacgagattattaaatccttgtttgataaatgtagccaatgagggttcgagttcaacgacgattgaattctcttcccgcggatgctgcatgatgaacgacgggatgttgttcgattgatttggaattctttttcgactttttgtttatattaaatattttaaaatttatagcggatagcaattcatgtaccacggataatgtagacgcgtattgcgcatcgatatctttattattagataaatttatcaataaatgtgagaagtttgcctcgttaaggtcttccatttaaatattatataaacatttgtgtttgtatcttattcgtcttttatggaatagttttttactagtaaagctgcaattacacactttgtccgtaaaacataaatataaacaccagcttttatcaatcgttccaaaaagtcgacggcggacatttttaacatggcatctattttaaatacacttaggtttttggaaaaaacatcattttataattgtaacgattcaataactaaagaaaagattaagattaaacataagggaatgtcatttgtattttataagccaaagcattctaccgttgttaaatacttgtctggaggaggtatatatcatgatgatttggttgtattggggaaggtaacaattaataatctaaagatgatgctattttacatggatttatcatatcatggagtgacaagtagtggagcaatttacaaattgggatcgtctatcgatagactttctctaaataggactattgttacaaaagttaataattatgatgatacattttttgacgacgatgattgatcgctattgcacaattttgtttttgtactttctaatatagtgtttaggttctttttcatatgagaatattgatttactaaaatatctatgtttaacttttgttctatgacgtccttatcggcggtatcggtacatatacgtaattcaccttcacaaaatacggagtcttcgataataatagccaatcgattattggatctagctgtctgtatcatattcaacatgtttaatatatcctttcgtttcccctttacaggcatcgatcgtagcatattttccgcgtctgatatggaaatgttaaaactacaaaaatgcgtaatgttagcccgtcctaatattggtacgtgtctataagtttggcatagtagaataatagacgtgtttaaatgccttccaaagtttaagaattctattagagtattgcattttgatagtttatcgcctacatcatcaaaaataagtaaaaagtgtgctgattttttatgattttgtgcgacagcaatacatttttctatgttacttttagttcgtatcagattatattctagagattcctgactactaacgaaattaatatgatttggccaaatgtatccatcataatctgggttataaacgggtgtaaacaagaatatatgtttatattttttaactagtgtagaaaacagagatagtaaatagatagtttttccagatccagatcctcctgttaaaaccattctaaacggcatttttaataaattttctcttgaaaattgtttttcttggaaacaattcataattatatttacagttactaaattaatttgataataaatcaaaatatggaaaactaaggttgttagtagggaggagaacaaagaaggcacatcgtgatataaataacatttattatcatgatgacaccagaaaacgacgaagagcagacatctgtgttctccgctactgtttacggagacaaaattcagggaaagaataaacgcaaacgcgtgattggtctatgtattagaatatctatggttatttcactactatctatgattaccatgtccgcgtttctcatagtgcgcctaaatcaatgcatgtctgctaacgaggctgctattactgacgccgctgttgccgttgctgctgcatcatctactcatagaaaggttgcgtctagcactacacaatatgatcacaaagaaagctgtaatggtttatattaccagggttcttgttatatattacattcagactaccagttattctcggatgctaaagcaaattgcactgcggaatcatcaacactacccaataaatccgatgtcttgactacctggctcattgattatgttgaggatacatggggatctgatggtaatccaattacaaaaactacatccgattatcaagattctgatgtatcacaagaagttagaaagtatttttgtgttaaaacaatgaactaatatttatttttgtacattaataaatgaaatcgcttaatagacaaactgtaagtaggtttaagaagttgtcggtgccggccgctataatgatgatactctcaaccattattagtggcataggaacatttctgcattacaaagaagaactgatgcctagtgcttgcgccaatggatggatacaatacgataaacattgttatttagatactaacattaaaatgtctacagataatgcggtttatcagtgtcgtaaattacgagctagattgcctagacctgatactagacatctgagagtattgtttagtattttttataaagattattgggtaagtttaaaaaagaccaatgataaatggttagatattaataatgataaagatatagatattagtaaattaacaaattttaaacaactaaacagtacgacggatgctgaagcgtgttatatatacaagtctggaaaactggttaaaacagtatgtaaaagtactcaatctgtactatgtgttaaaaaattctacaagtgacaacaaaaaatgaattaataataagtcgttaacgtacgccgccatggacgccgcgtttgttattactccaatgggtgtgttgactataacagatacattgtatgatgatctcgatatctcaatcatggactttataggaccatacattataggtaacataaaaactgtccaaatagatgtacgggatataaaatattccgacatgcaaaaatgctactttagctataagggtaaaatagttcctcaggattctaatgatttggctagattcaacatttatagcatttgtgccgcatacagatcaaaaaataccatcatcatagcatgcgactatgatatcatgttagatatagaagataaacatcagccattttatctattcccatctattgatgtttttaacgctacaatcatagaagcgtataacctgtatacagctggagattatcatctaatcatcaatccttcagataatctgaaaatgaaattgtcgtttaattcttcattctgcatatcagacggcaatggatggatcataattgatgggaaatgcaatagtaattttttatcataaaagttgtaaagtaaataataaaacaataaatattgaactagtagtacgtatattgagcaatcagaaatgatgctggtacctcttatcacggtgaccgtagttgcgggaacaatattagtatgttatatattatatatttgtaggaaaaagatacgtactgtctataatgacaataaaattatcatgacaaaattaaaaaagataaagagttctaattccagcaaatctagtaaatcaactgatagcgaatcagactgggaggatcactgtagtgctatggaacaaaacaatgacgtagataatatttctaggaatgagatattggacgatgatagcttcgctggtagtttaatatgggataacgaatccaatgttatggcgcctagcacagaacacatttacgatagtgttgctggaagcacgctgctaataaataatgatcgtaatgaacagactatttatcagaacactacagtagtaattaatgaaacggagactgttgaagtacttaatgaagataccaaacagaatcctaactattcatccaatcctttcgtaaattataataaaaccagtatttgtagcaagtcaaatccgtttattacagaacttaacaataaatttagtgagaataatccgtttagacgagcacatagcgatgattatcttaataagcaagaacaagatcatgaacacgatgatatagaatcatcggtcgtatcattggtgtgattagtttcctttttataaaattgaagtaatatttagtattattgctgccgtcacgttgtacaaatggagatattccctgtattcggcatttctaaaattagcaattttattgctaataatgactgtagatattatatagatacagaacatcaaaaaattatatctgatgagatcaatagacagatggatgaaacggtacttcttaccaacatcttaagcgtagaagttgtaaatgacaatgagatgtaccatcttattcctcatagattatcgacgattatactctgtattagttctgtcggaggatgtgttatctctatagataatgacatcaatggcaaaaatattctaacctttcccattgatcatgctgtaatcatatccccactgagtaaatgtgtcgtagttagcaagggtcctacaaccatattggttgttaaagcggatatacctagcaaacgattggtaacatcgtttacaaacgacatactatatgtaaacaatctgtcactgattaattatttgccgttgtctgtattcattattagacgagtcaccgactatttggatagacacatatgcgatcagatatttgctaataataagtggtattcccttataaccatcgacgataagcaatatcctattccatcaaactgtataggtatgtcctctgccaagtacataaattctagcatcgagcaagatactttaatccatgtttgtaacctcgagcatccgttcgactcagtatacaaaaaaatgcagtcgtacaattctctacctatcaaggaacaaatattgtacggtagaattgataatataaatatgagcattagtatttctgtggattaatagatttctagtatggggatcattaatcatctctaatctctaaatacctcataaaacgaaaaaaaagctattatcaaatactgtacggaatggattcattctcttctctttttatgaaactctgttgtatatctactgataaaactggaagcaaaaaatctgatagaaagaataagaataagatcaaggattatatggaacacgattattataaaataacaatagttcctggttcctcttccacgtctactagctcgtggtattatacacatgcctagtaatagtctctttgcgttgacggaaagcagactagaaataacaggctaaaatgttcagacaccataatagttcccaacccagataataacagagttccatcaacacattcctttaaactcaatcccaaacccaaaaccgttaaaatgtatccggccaattgatagtagataatgaggtgtacagcgcatgataatttacacagtaaccaaaatgaaaatactttagtaattataagaaatatagacggtaatgtcatcatcaacaatccgataatatgcctgagagtaaacattgacggataaaacaaaaatgctccgcataactctatcatggcaataacacaaccaaatacttgtaagattcctaaattagtagaaaatacaacgaatatcgatgtataagtgatctcgagaaataataagaataaagtaatgcccgtaaagataaacatcaacattgtttggtaatcattaaaccaattagtatgaagttgaactaatttcacagtagattttattccagtgttatcctcgcatgtataagtacctggtaagatatctttatattccataatcaatgagacatcactatctgataacgaatgaagtctagcactagtatgccatttacttaatattgtcgtcttggaagttttattataagttaaaatatcatggttatccaatttccatctaatatactttgtcggattatctatagtacacggaataatgatggtatcattacatgctgtatactctatggtctttgtagttgttataacaaccaacgtatagaggtatatcaacgatattctaactcttgacattttttatttatttaaaatgatacctttgttatttattttattctattttgctaacggtattgaatggcataagtttgaaacgagtgaagaaataatttctacttacttattagacgacgtattatacacgggtgttaatggggcggtatacacattttcaaataataaactaaacaaaactggtttaactaataataattatataacaacatctataaaagtagaggatgcggataaggatacattagtatgcggaaccaataacggaaatcccaaatgttggaaaatagacggttcagacgacccaaaacatagaggtagaggatacgctccttatcaaaatagcaaagtaacgataatcagtcacaacggatgtgtactatctgacataaacatatcaaaagaaggaattaaacgatggagaagatttgacggaccatgtggttatgatttattcacggcggataacgtaattccaaaagatggtttacgaggagcattcgtcgataaagacggtacttatgacaaagtttacattcttttcactgatactatcggctcaaagagaattgtcaaaattccgtatatagcacaaatgtgcctaaacgacgaaggtggtccatcatcattgtctagtcatagatggtcgacgtttctcaaagtcgaattagaatgtgatatcgacggaagaagttatagacaaattattcattctagaactataaaaacagataatgatacgatactatatgtattcttcgatagtccttattccaagtccgcattatgtacctattctatgaataccattaaacaatctttttctacgtcaaaattggaaggatatacaaagcaattgccgtctccagctcctggtatatgtttaccagctggaaaagttgttccacataccacgtttgaagtcatagaacaatataatgtactagatgatattataaagcctttatctaaccaacctatcttcgaaggaccgtctggtgttaaatggttcgatataaaggagaaggaaaatgaacatcgggaatatagaatatacttcataaaagaaaattctatatattcgttcgatacaaaatctaaacaaactcgtagctcgcaagtcgatgcgcgactattttcagtaatggtaactgcgaaaccgttatttatagcagatatagggataggagtaggaatgccacaaatgaaaaaaatacttaaaatgtaatcttaatcgagtacaccacacgacaatgaacaaacataagacagattatgctggttatgcttgctgcgtaatatgcggtctaattgtcggaattatttttacagcgacactattaaaagttgtagaacgtaaattagttcatacaccattaatagataaaacgataaaagatgcatatattagagaagattgtcctactgactggataagctataataataaatgtatccatttatctactgatcgaaaaacctgggaggaaggacgtaatgcatgcaaagctctaaattcaaattcggatctaattaagatagagactccaaacgagttaagttttttaagaagccttagacgaggctattgggtaggagaatccgaaatattaaaccagacaaccccatataattttatagctaagaatgccacgaagaatggaactaaaaaacggaaatatatttgtagcacaacgaatactcccaaactgcattcgtgttacactatataacaattacactacatttttatcataccactacttcggttagatgttttagaaaaaaataaatatcgccgtaccgttcttgtttttataaaaataacaattaacaattatcaaattttttctttaatattttacgtggttgaccattcttggtggtaaaataatctcttagtgttggaatggaatgctgtttaatgtttccacactcatcgtatattttgacgtatgtagtcacatcgtttacgcaatagtcagactgtagttctatcatgcttcctacatcagaaggaggaacagttttaaagtctcttggttttaatctattaccgttagttttcatgaaatcctttgttttatccacttcacattttaaataaatgtccactatacattcttttgttaattttactagatcgtcatgggtcatagaatttataggttccgtagtccatggatccaaactagcaaacttcgcgtatacggtatcgcgattagtgtatacaccaactgtatgaaaattaagaaaacagtttaataaatcaacagaaatatttaatcctccgtttgatacagatgcgccatatttatggatttcggattcacacgttgtttgtctgaggtgttcgtctagtgttgcttctacgtaaacttcgattcccatatattctttattgtcagaatcgcataccgatttatcatcatacactgtttgaaaactaaatggtatacacatcaaaataataaataataacgagtacattctgcaatattgttatcgtaattggaaaaatagtgttcgagtgagttggattatgtgagtattggattgtatattttattttatattttgtaataagaataaaatgctaatgtcaagtttattccaatagatgtcttattaaaaacatatataataaataacaatggctgaatggcataaaattatcgaggatatctcaaaaaataataagttcgaggatgccgccatcgttgattacaagactacaaagaatgttctagctgctattcctaacagaacatttgccaagattaatccgggtgaaattattcctctcatcactaatcgtaatattctaaaacctcttattggtcagaaatattgtattgtatatactaactctctaatggatgagaacacgtatgctatggagttgcttactgggtacgcccctgtatctccgatcgttatagcgagaactcataccgcacttatatttttgatgggtaagccaacaacatccagacgtgacgtgtatagaacgtgtagagatcacgctacccgtgtacgtgcaactggtaattaaaataaaaagtaatattcatatgtagtgtcaattttaaatgatgatgatgaaatggataatatccatattgacgatgtcaataatgccggtattggcatacagttcatcgatttttagatttcattcagaggatgtggaattatgttatgggcatttgtattttgataggatctataatgtagtaaatataaaatataatccgcatattccatatagatataattttattaatcgcacgttaaccgtagatgaactagacgataatgtcttttttacacatggttattttttaaaacacaaatatggttcacttaatcctagtttgattgtctcattatcaggaaacttaaaatataatgatatacaatgctcagtaaatgtatcgtgtctcattaaaaatttggcaacgagtacatctactatattaacatctaaacataagacttattctctacatcggtccacgtgtattactataataggatacgattctattatatggtataaagatataaatgacaagtataatgacatctatgattttactgcaatatgtatgctaatagcgtctacattgatagtgaccatatacgtgtttaaaaaaataaaaatgaactcttaattatgctatgctattagaaatggataaaatcaaaattacggttgattcaaaaattggtaatgttgttaccatatcgtataacttggaaaagataactattgatgtcacacctaaaaagaaaaaagaaaaggatgtattattagcgcaatcagttgctgtcgaagaggcaaaagatgtcaaggtagaagaaaaaaatattatcgatattgaagatgacgatgatatggatgtagaaagcgcgtaatacgatctataaaaataagtatataaatactttttatttactgtactcttactgtgtagtggtgataccctactcgattatttttttaaaaaaaaaatacttattctgattcttctagccatttccgtgttcgtttgaatgccacatcgacgtcaaagataggggagtagttgaaatctagttctgcattgttggtacgcacctcaaatgtagtgttggatatcttcaacgtatagttgttgagtagtgatggttttctaaatagaattctcttcatatcattcttgcacgcgtacatttttagcatccatcttggaatcctagatccttgttctattcccaatggtttcatcaatagaagattaaacatatcgtacgaacacgatggagagtaatcgtagcaaaagtaagcatttcctttaatcttagatcccggatactggatatattttgcagccaacacgtgcatccatgcagcatttcctacatatacccggctatgcaccgcgtcatcatcgactgtacgatacataatgttaccgtgttgcttacattgctcgtaaaagactttcatcaatttgtctccttctccgtaaattccagtgggtcttaggcaacaagtatacaattttgctccattcatgattacggaattattggctttcataaccagttgctcggccatacgtttactttttgcgtatacatgtcctggtgatatatcataaagggtatgctcatggccgatgaatggatcaccgtgtttattgggtcctattgcttccatgctactagtatagatcaaatacttgattcctaggtccacacaagctgccaaaatagtctgtgttccataatagtttactttcatgatttcattatcggtgtattttccaaatacatccactagagcagccgtatgaataatcagatttaccccatctagcgcttctctcaccttatcaaagtcgtttatatcacattgtatatagtttataaccttaactttcgaggttattggttgtggatcttctacaatatctatgactctgatttcttgaacatcatctgcactaattaacagttttactatatacctgcctagaaatccggcaccaccagtaaccgcgtacacggccattgctgccactcataatatcagactacttattctattttactaaataatggctgtttgtataatagaccacgataatatcagaggagttatttactttgaaccagtccatggaaaagataaagttttaggatcagttattggattaaaatccggaacgtatagtttgataattcatcgttacggagatattagtcaaggatgtgattccataggcagtccagaaatatttatcggtaacatctttgtaaacagatatggtgtagcatatgtttatttagatacagatgtaaatatatttacaattattggaaaggcgttatctatttcaaaaaatgatcagagattagcgtgtggagttattggtatttcttacataaatgaaaagataatacattttcttacaattaacgagaatggcgtttgatatatcagttaatgcgtctaaaacaataaatgcattagtttacttttctactcagcaaaataaattagtcatacgtaatgaagttaatgatacacactacactgtcgaatttgatagggacaaagtagttgacacgtttatttcatataatagacataatgacaccatagagataagaggggtgcttccagaggaaactaatattggttgcgcggttagtatgacttacttgtataataagtatagttttaaactgattttagcagaatatataagacacagaaatactatatccggcaatatttattcggcattgatgacactagatgatttggctattaaacagtatggagacattgatctattatttaatgagaaacttaaagtagactccgattcgggactatttgactttgtcaactttgtaaaggatatgatatgttgtgattctagaatagtagtagctctatctagtctagtatctaaacattgggaattgacaaataaaaaatataggtgtatggcattagccgaacatatatctgatagtattccaatatctgagctatctagactacgatacaatctatgtaagtatctacgcggacacactgagagcatagaggataaatttgattattttgaagacgatgattcgtctacatgttctgccgtaaccgacagggaaacggatgtataattttttttatagcgtgaaggatatgataaaaaatataattgttgtatttatcccattccaatcaccttatatgattctgtaacacaataaaggagtcttatagatgtatagaggtcagatactggtttgataaactgtttattccacataagtatgtttgactttatggttagacccgcatactttaacaaatcactgaaaattggagttaggtattgacctctcagaatcagttgccgttctggaacattaaatgtattttttatgatatactccaacgcatttatgtgggcatacaacaagtcattactaatggaatattccaagagttttagttgtctagtatttaacaagagaagagatttcaacagactgtttatgaactcgaatgccgcctcattgtcgcttatattgatgatgtcgaattctcccaatatcatcaccgatgagtagctcatcttgttatcgggatccaagttttctaaagatgtcattaaaccctcgatcatgaatggatttatcatcatcgtttttatgttggacatgagcttagtccgtttgtccacatctatagaagatgatttctgaattatttcatatatctctctctttaactccaggaacttgtcaggatggtctactttaatatgttctcgtctaagagatgaaaatctttggatggttgcacgcgacttttctctaaaggatgacgttgcccaagatcctctcttaaatgaatccatcttatccttggacaagatggacagtctattttccttagatggtttaatatttttgttacccatgatctataaaggtagacctaatcgtctcggatgaccatatatttattttcagttttattatacgcataaattgtaaaaaatatgttaggtttacgaaaatgtctcgtggggcattaatcgtttttgaaggattggacaaatctggaaaaacaacacaatgtatgaacatcatggaatcaataccttcaaacacaataaaataccttaactttcctcagagatccactgtcactggaaagatgatagatgactatctaactcgtaaaaaaacctataatgatcatatagttaatctattattttgtgcaaatagatgggagtttgcatcttttatacaagaacaactagaacagggaattactttaatagttgatagatacgcattttctggagtagcgtatgccgccgctaaaggcgcgtcaatgactctcagtaagagttatgaatctggattgcctaaacccgacttagttatattcttggaatctggtagcaaagaaattaatagaaacgtcggtgaggaaatttatgaagatgttacattccaacaaaaggtattacaagaatataaaaaaatgattgaagaaggagatattcattggcaaattatttcttctgaattcgaggaagatgtaaagaaggagttgattaagaatatagttatagaggctatacacacggttactggaccagtggggcaactgtggatgtaatagtgaaattacattttttataaatagatgttagtacagtgttataaatggatgaagcatattactctggcaacttggaatcagtactcggatacgtgtccgatatgcataccgaactcgcatcaatatctcaattagttattgccaagatagaaactatagataatgatatattaaacaaggacattgtaaattttatcatgtgtagatcaaacttggataatccatttatctctttcctagatactgtatatactattatagatcaagagaactatcagactgagttgattaattcattagacgacaatgaaattatcgattgtatagttaataagtttatgagcttttataaggataacctagaaaatatagtagatgctatcattactctaaaatatataatgaataatccagattttaaaactacgtatgccgaagtactcggttccagaatagccgatatagatattaaacaagtgatacgtaagaatatactacaattgtctaataatatccgcgaacgatatttgtgaaaatattaaaaaaaaatactttttttattaaatgacgtcttttcgtgaatttagaaaattatgctgtgctatatatcacgcatcaggatataaagaaaaatctaaattaattagagactttataacagatagggatgataaatatttgatcattaagctattgcttcccggattagacgatagaatttataacatgaacgataaacaaattataaaattatatagtataatatttaaacaatctcaggaagatatgctacaagatttaggatacggatatataggagacactattaggactttcttcaaagagaacacagaaatccgtccacgagataaaagcattttaactttagaagaagtggatagttttttaactacgttatcatccgtaactaaagaatcgcatcaaataaaattattgactgatgtagcatctgtttgtacatgtaatgatttaaaatgtgtagtcatgcttattgataaagatctaaaaattaaagcgggtcctcggtacgtacttaacgctattagtcctaatgcctatgatgtgtttagaaaatctaataacttgaaagagataatagaaaattcatctaaacaaaatctagactctatatctatttctgttatgactccaattaatcccatgttagcggaatcgtgtgattctgtcaataaggcgtttaaaaaatttccatcaggaatgtttgcggaagtcaaatacgatggtgaaagagtacaagttcataaaaataataacgagtttgccttctttagtagaaacatgaaaccagtactctctcataaagtggattatctcaaagaatacataccgaaagcatttaaaaaagctacgtctatcgtattggattctgaaattgttcttgtagacgaacataatgtaccgctcccgtttggaagtttaggtatacacaaaaagaaagaatataaaaactctaacatgtgtttgttcgtgtttgactgtttgtactttgatggattcgatatgacggacattccattgtacgaacgaagatcttttctcaaagatgttatggttgaaatacccaatagaatagtattctcagagttgacgaatattagtaacgagtctcagttaactgacgtattggatgatgcactaacgagaaaattagaaggattggtcttaaaagatattaatggagtatacgaaccgggaaagagaagatggttaaaaataaagcgagactatttgaacgagggttccatggcagattctgccgatttagtagtactaggtgcctactatggtaaaggagcaaagggtggtatcatggcagtctttctaatgggttgttacgacgatgaatccggtaaatggaagacggttaccaagtgttcaggacacgatgataatacgttaagggagttgcaagaccaattaaagatgattaaaattaacaaggatcccaaaaaaattccagagtggttagtagttaataaaatctatattcccgattttgtagtagaggatccgaaacaatctcagatatgggaaatttcaggagcagagtttacatcttccaagtcccataccgcaaatggaatatccattagatttcctagatttactaggataagagaggataaaacgtggaaagaatctactcatctaaacgatttagtaaacttgactaaatcttaatagttacatacaaactgaaaattaaaataacactatttagttggtggtcgccatggatggtgttattgtatactgtctaaacgcgctagtaaaacatggcgaggaaataaatcatataaaaaatgatttcatgattaaaccatgttgtgaaagagtttgtgaaaaagtcaagaacgttcacattggcggacaatctaaaaacaatacagtgattgcagatttgccatatatggataatgcggtatccgatgtatgcaattcactgtataaaaagaatgtatcaagaatatccagatttgctaatttgataaagatagatgacgatgacaagactcctactggtgtatataattattttaaacctaaagatgccattcctgttatcatatctataggaaaggataaagatgtctgtgaactattaatctcatcagacatatcgtgtgcatgcgtggagttaaattcatatcacgtagccattcttcccatggatgtttccttttttaccaaaggaaatgcatcattgattattctcctgtttgatttctctatcgatgcggcacctctcttaagaagtgtaaccgataataatgttattatatctagacaccagcgtctacatgacgagcttccgagttccaattggttcaagttttacataagtataaagtccgactattgttctatattatatatggttgttgatggatctgtgatgcatgcgatagctgataatagaactcacgcaattattagcaaaaatatattagacaatactacgattaacgatgagtgtagatgctgttattttgaaccacagattaggattcttgatagagatgagatgctcaatggatcatcgtgtgatatgaacagacattgtattatgatgaatttacctgatgtaggcgaatttggatctagtatgttggggaaatatgaacctgacatgattaagattgctctttcggtggctggtaatttaataagaaatcgagactacattcccgggagacgaggatatagctactacgtttacggtatagcctctagataatttttttaagcacgaaataaaaaacataattttaaaccaatctatttcatactattttgtgtgatcaccatggacataaagatagatattagtatttctggtgataaatttacggtgactactaggagggaaaatgaagaaagaaaaaaatatctacctctccaaaaagaaaaaactactgatgttatcaaacctgattatcttgagtacgatgacttgttagatagagatgagatgtttactattctagaggaatattttatgtacagaggtctattaggcctcagaataaaatatggacgactctttaacgaaattaaaaaattcgacaatgatgcggaagaacaattcggtactatagaagaactcaagcagaaacttagattaaattctgaagagggagcagataactttatagattatataaaggtacaaaaacaggatatcgtcaaacttactgtatacgattgcatatctatgataggattgtgtgcatgcgtggtagatgtttggagaaatgagaaactgttttctagatggaaatattgtttacgagcgattaaactgtttattgatgatcacatgcttgataagataaaatctatactgcagaatagactagtatatgtggaaatgtcatagaaagttaaaagttaatgagagcaaaaatatataaggttgtattccatatttgttatttttttctgtaatagttagaaaaatacattcgatggtctatctatcagattattatgtgttataaggtactttttctcataataaactagagtatgagtaagatagtgtttttcaaaacatataaatctaaaattgatggatgagatatacagctattaatttcgaaaatatattttaatctgataactttaaacatggatttttaatggtggtttaacgttttaaaaaaagattttgttattgtagtatatgataatattaaaagatggatataaagaatttgctgactgcatgtactattttttacattactacattggctacggcagatatacctacttcgtcactgccacacgctccggtaaacggggcatgtgacgagggagaatatcttgataagaggcataatcaatgttgtaatcagtgtccacctggagaatttgccaaggttagatgtaatggtaacgataacacaaaatgtgaacgctgcccacctcatacatataccgcaatccccaattactctaatggatgtcatcaatgtagaaaatgcccaacaggatcatttgataaggtaaagtgtaccggaacacagaacagtaaatgttcgtgtcttcctggttggtattgcgctactgattcttcacagactgaagattgtcgagattgtataccaaaaaggagatgtccatgcggatactttggtggaatagatgaacaaggaaatcctatttgtaaatcgtgttgtgttggtgaatattgcgactacctacgtaattatagacttgatccatttcctccatgcaaactatctaaatgtaattaattatgattttgatgataatgttaccatacattatatcgctacttggttagtgtattattcagtatgaagacctattaataattacttatcttttgacgatcttgttataattataatataaaaatacttatggcatagtaactcataattgctgacgcgataaattcgtaataatctgttttgttcaaatttttataaggaatctacaggcataaaaataaaaatataatttataatatactcttacagcgcgccatcatgaataacagcagtgaattgattgctgttattaatggatttagaaatagtggacgattttgtgatattaatatagttattaatgatgaaaggataaacgctcacagactcatcctatctggagcctccgaatatttttccattctgttttccaataattttatcgattctaatgaatacgaagttaatctaagtcatttagattatcaaagtgttaacgatttgatcgattacatttatgggatacctttgagcctaactaacgataacgtgaaatatattctttcaaccgctgattttttacaaattggatctgctattacggagtgtgaaaattacatacttaaaaatctttgttctagaaactgtatcgatttctacatatacgctgataaatataataacaagaaaatagaatcagcgtcgtttaacacaatattacaaaatattttgagactcatcaacgatgaaaactttaaatacttaacagaggaatcaatgataaaaattttaagcgatgatatgttaaatataaaaaatgaggatttcgccccactaattctcattaaatggttagagagtactcaacaaccatgcaccgtcgagttacttaaatgcctcagaatatcattgctttccccacaagttataaaatcactttatagtcatcgactggttagttcaatctacgaatgtataacattcttaaacaatatagcattcttggatgaatcatttcctagataccatagcatcgagttgatatctatcggtataagtaattcgcatgataagatttccataaactgctacaatcataaaaaaaatacatgggaaatgatatcttcacgtagatataggtgtagtttcgcagtggccgtcctggataatattatctatatgatgggtggatatgatcagtccccgtatagaagttcaaaggttatagcgtacaatacatgtacaaattcttggatatatgatataccagagctaaaatatcctcgttctaattgtgggggactggctgatgacgaatacatttattgtataggcggcatacgcgatcaggattcatcgttgacatctagtattgatagatggaagccatcaaaaccatattggcagaagtatgctaaaatgcgcgaaccaaaatgtgatatgggggttgcgatgttaaacggattaatatatgttataggtggaatcgttaaaggtgacacgtgtaccgacgcactagagagtttatcagaagatggatggatgaagcatcaacgtcttccaataaaaatgtccaatatgtcgacgattgttcatgatggcaagatttatatatctggaggttacaacaatagtagtgtagttaatgtaatatcgaatctagtccttagctataattcgatatatgatgaatggaccaaattatcatcattaaacattcctagaattaatcccgctctatggtcagcgcataataaattatatgtaggaggaggaatatctgatgatgttcgaactaatacatctgagacatacgacaaagaaaaagattgttggacattggataatggtcacgtgttaccacgcaattatataatgtataaatgcgaaccgattaaacataaatatccattggaaaaaacacagtacacgaatgattttctaaagtatttggaaagttttataggtagttgatagaacaaaatacataattttgtaaaaataaatcactttttatactaatatgacacgattaccaatacttttgttactaatatcattagtatacgctacaccttttcctcagacatctaaaaaaataggtgatgatgcaactctatcatgtaatcgaaataatacaaatgactacgttgttatgagtgcttggtataaggagcccaattccattattcttttagctgctaaaagcgacgtcttgtattttgataattataccaaggataaaatatcttacgactctccatacgatgatctagttacaactatcacaattaaatcattgactgctagagatgccggtacttatgtatgtgcattctttatgacatcgcctacaaatgacactgataaagtagattatgaagaatactccacagagttgattgtaaatacagatagtgaatcgactatagacataatactatctggatctacacattcaccggaaactagttctgagaaacctgattatatagataattctaattgctcgtcggtattcgaaatctaagctcttttttttttttttttttttggcatataaataagtcgacccaccatggagacagacacactcctgctatgggtactgctgctctgggttccaggttccactggtgacgaggtccaactggtggagtcagggggagggctggtccagcctggagggtccctgaggctctcctgtgcagcctctggattcactatcagcgactactggatccactgggttcgccaggccccgggcaagggcctggagtgggtcgcaggaatcaccccagccggtggttacacctactacgccgactcagtcaagggacgattcaccatctccgccgacacctccaagaacaccgcctacctgcaaatgaacagcctgagggccgaggacacggccgtgtattactgtgcaaggttcgtgttcttcctgccatatgccatggactactggggccaagggaccctggtcaccgtctcctcaggtggtggcggttcaggcggaggtggctctggcggtggcggatcggacattcagatgacccagtctccaagctccctgtccgctagcgtcggagacagggtcactatcacttgcagagcttcccaggacgtctccactgcagtggcatggtaccagcagaagccagggaaggcaccaaagctccttatttactcagcaagcttcctttactccggagtcccatcccgattcagcggcagcggcagtggcacagattttaccctcacaatttcaagcctccaaccagaggatttcgcaacctactactgtcaacaaggctacggcaacccattcaccttcgggcaagggaccaaggttgagattaagcgataattaattaatttttatcgatctaattcaacaatgtctggagagcttcgcaggatcccgactccggaaccaattactgataaagaagaagatcatacagttacagacactgtctcatacactacagtaagtacatcatctggaattgtcactactaaatcaaccaccgatgatacgtacaatgataatgatacagtaccaccaactactgtaggcggtagtacaacctctattagcaattataaaaccaaggactttgtagaaatatttggtattaccgcattaattatattgtcggccgtggcaatattctgtattacgtattatatatgtaataaacgttcacgtaaatacaaaacagagaacaaagtctagatttttgacttacataaatgtctgggatagtaaaatctatcatattgagcggaccatctggtttaggaaagacagccatagccaaaagactatgggaatatatttggatttgtggtgtcccataccactagatttcctcgtcctatggaacgagaaggtgttgattaccattacgttaacagagaggccatctggaagggaatagccgccggaaactttctagaacatactgagtttttaggaaatatttacggaacttctaaaacagctgtgaatacagcggctattaataatcgtatttgtgtgatggatctaaacatcgacggtgttagaagtcttaaaaatacgtacctaatgccttactcggtgtatataagacctacctctcttaaaatggttgagaccaagcttcgtcgtagaaacactgaagctaacgatgagattcatcgtcgtgtgatgttggcaaaaactgacatggatgaggcaggtgaagccggtctattcgacactattatcattgaagatgatgtgaatttagcatatagtaagttaattcagatactacaggaccgtattagaatgtattttaacactaattagagacttaagacttaaaacttgataattaataatataactcgtttttatatgtgtctatttcaacgtctaatgtattagttaaatattaaaacttaccacgtaaaacttaaaatttaaaatgatatttcattgacagatagatcacacattatgaactttcaaggacttgtgttaactgacaattgcaaaaatcaatgggtcgttggaccattaataggaaaaggtggattcggtagtatttatactactaatgacaataattatgtagtaaaaatagagcccaaagctaacggatcattatttaccgaacaggcattttatactagagtacttaaaccatccgttatcgaagaatggaaaaaatctcacaatataaagcacgtaggtcttatcacgtgcaaggcatttggtctatacaaatccattaatgtggaatatcgattcttggtaattaatagattaggtgcagatctagatgcggtgatcagagccaataataatagactaccaaaaaggtcggtgatgttgatcggaatcgaaatcttaaataccatacaatttatgcacgagcaaggatattctcacggagatattaaagcgagtaatatagtcttagatcaaatagataagaataaattatatctagtggattacggattggtttctaaattcatgtctaatggcgaacatgttccatttataagaaatccaaataaaatggataacggtactctagaatttacacctatagattcgcataaaggatacgttgtatctagacgtggagatctagaaacacttggatattgtatgattagatggttgggaggtatcttaccatggactaagatatctgaaacaaagaattgtgcattagtaagtgccacaaaacagaaatatgttaacaatactgcgactttgttaatgaccagtttgcaatatgcacctagagaattgctgcaatatattaccatggtaaactctttgacatattttgaggaacccaattacgacaagtttcggcacatattaatgcagggtgtatattattaagtgtggtgtttggtcgataaaaattaaaaaataacttaatttattattgatctcgtgtgtacaaccgaaatcatggcgatgttttacgcacacgctctcggtgggtacgacgagaatcttcatgcctttcctggaatatcatcgactgttgccaatgatgtcaggaaatattctgttgtgtcagtttataataacaagtatgacattgtaaaagacaaatatatgtggtgttacagtcaggtgaacaagagatatattggagcactgctgcctatgtttgagtgcaatgaatatctacaaattggaaatccgatccatgatcaagaaggaaatcaaatctctatcatcacatatcgccacaaaaactactatgctctaagcggaatcgggtacgagagtctagacttgtgtttggaaggagtagggattcatcatcacgtacttgaaacaggaaacgctgtatatggaaaagttcaacatgattattctactatcaaagagaaggccaaagaaatgagtgcacttagtccaggacctatcatcgattaccacgtctggataggagattgtatctgtcaagttactgctgtggacgtacatggaaaggaaattatgaaaatgagattcaaaaagggtgcggtgcttccgatcccaaatctggtaaaagttaaacttggggagaatgatacagaaaatctttcttctactatatcggcggcaccatcgaggtaaccacctctctggaagacagcgtgaatcatgtactcatgaaacgtttggaaactatacgccatatgtggtctgttgtatatgatcattttgatattgtgaatggtaaagaatgctgttatgtgcatacgcattcatctaatcaaaatcctataccgagtactgtaaaaacaaatttgtacatgaagactatgggatcatgcattcaaatggattccatggaagctctagagtatcttagcgaactgaaggaatcaggtggatggagtcccagaccagaaatgcaggaatttgaatatccagatggagtggaagacactgaatcaattgagagattggcagaggagttcttcaatagatcagaacttcaggctggtgaatcagtcaaatttggtaattctattaattgttaaacatacatctgtttcagctaagcaactaagaacacgtatacggcagcagcttccttctatactctcatcttttaccaacacaaagggtggatatttgttcattggagttgataataatacacacaaagtatttggattcacggtgggttacgactacctcagactgatagagaatgatatagaaaagcatatcaaaagacttcgtgttgtgcatttctgtgagaagaaagaggacatcaagtacgcgtgtcgattcatcaaggtatataaacctggggatgagactacctcgacatacgtgtgcgctatcaaagtggaaagatgctgttgtgctgtgtttgcagattggccagaatcatggtatatggatactaatggtatcaagaagtattctccagatgaatgggtgtcacatataaaattttaattaatgtaactatagagaacaaataataaggttgtaatatcatatagacaataactaacaattaattagtaactgttatctcttttttaactaaccaactaactatatacctattaatacatcgtaattatagttcttaacatctattaatcattaattcgcttctttaattttttataaactaacattgttaattgaaaagggataacatgttacagaatataaattatatatggatttttttaaaaaggaaatacttgactggagtatatatttatctcttcattatatagcacgcgtgttttccaatttttccacatcccatataatacaggattataatctcgttcgaacatacgagaaagtggataaaacaatagttgattttttatctaggttgccaaatttattccatattttagaatatggggaaaatattctacatatttattctatggatgatgctaatacgaatattataattttttttctagatagagtattaaatattaataagaacgggtcatttatacacaatctcgggttatcatcatccattaatataaaagaatatgtatatcaattagttaataatgatcatccagataataggataagactaatgcttgaaaatggacgtagaacaagacattttttgtcctatatatcagatacagttaatatctatatatgtattttaataaatcatggattttatatagatgccgaagacagttacggttgtacattattacatagatgtatatatcactataagaaatcagaatcagaatcatacaatgaattaattaagatattgttaaataatggatcagatgtagataaaaaagatacgtacggaaacacaccttttatcctattatgtaaacacgatatcaacaacgtggaattgtttgagatatgtttagagaatgctaatatagactctgtagactttaatagatatacacctcttcattatgtctcatgtcgtaataaatatgattttgtaaagttattaatttctaaaggagcaaatgttaatgcgcgtaataaattcggaactactccattttattgtggaattatacacggtatctcgcttataaaactatatttggaatcagacacagagttagaaatagataatgaacatatagttcgtcatttaataatttttgatgctgttgaatctttagattatctattatccagaggagttattgatattaactatcgtactatatacaacgaaacatctatttacgacgctgtcagttataatgcgtataatacgttggtctatctattaaacaaaaatggtgattttgagacgattactactagtggatgtacatgtatttcggaagcagtcgcaaacaacaacaaaataataatggaagtactattgtctaaacgaccatctttgaaaattatgatacagtctatgatagcaattactaaacataaacagcataatgcagatttattgaaaatgtgtataaaatatactgcgtgtatgaccgattatgatactcttatagatgtacagtcgctacagcaatataaatggtatattttaagatgtttcgatgaaatagatatcatgaagagatgttatataaaaaataaaactgtattccaattagttttttgtatcaaagacattaatactttaatgagatacggtaaacatccttctttcgtgaaatgcactagtctcgacgtatacggaagtcgtgtacgtaatatcatagcatctattagatatcgtcagagattaattagtctattatccaagaagctggatcctggagataaatggtcgtgttttcctaacgaaataaaatataaaatattggaaaactttaacgataacgaactatccacatatctaaaaatcttataaacattattaaaatataaaatctaagtaggataaaatcacactacatcattgtttccttttagtgctcgacagtgtatactatttttaacgctcataaataaaaatgaaaacgatttccgttgttacgttgttatgcgtactacctgctgttgtttattcaacatgtactgtacccactatgaataacgctaaattaacgtctaccgaaacatcgtttaatgataaccagaaagttacgtttacatgtgatcagggatatcattctttggatccaaatgctgtctgtgaaacagataaatggaaatacgaaaatccatgcaaaaaaatgtgcacagtttctgattatgtctctgaactatataataaaccgctatacgaagtgaattccaccatgacactaagttgcaacggcgaaacaaaatattttcgttgcgaagaaaaaaatggaaatacttcttggaatgatactgttacgtgtcctaatgcggaatgtcaacctcttcaattagaacacggatcgtgtcaaccagttaaagaaaaatactcatttggggaatatatgactatcaactgtgatgttggatatgaggttattggtgcttcgtacataagttgtacagctaattcttggaatgttattccatcatgtcaacaaaaatgtgatatgccgtctctatctaacggattaatttccggatctacattttctatcggtggcgttatacatcttagttgtaaaagtggttttacactaacggggtctccatcatccacatgtatcgacggtaaatggaatcccatactcccaatatgtgtacgaactaacgaaaaatttgatccagtggatgatggtcccgacgatgagacagatttgagcaaactctcgaaagacgttgtacaatatgaacaagaaatagaatcgttagaagcaacttatcatataatcatagtggcgttgacaattatgggcgtcatatttttaatctccgttatagtattagtttgttcctgtgacaaaaataatgaccaatataagttccataaattgctaccgtaaatataaatccgttaaaataattaataatttaataacaaacaagtatcaaaagattaaagacttatagctagaatcaattgagatgtcttcttcagtggatgttgatatctacgatgccgttagagcatttttactcaggcactattataacaagagatttattgtgtatggaagaagtaacgccatattacataatatatacaggctatttacaagatgcgccgttataccgttcgatgatatagtacgtactatgccaaatgaatcacgtgttaaacaatgggtgatggatacacttaatggtataatgatgaatgaacgcgatgtttctgtaagcgttggcaccggaatactattcatggaaatgtttttcgattacaataaaaatagtatcaacaatcaactaatgtatgatataattaatagcgtatctataattctagctaatgagagatatagaagcgcttttaacgacgatggtatatacatccgtagaaatatgattaacaagttgtacggatacgcatctctaactactattggcacgatcgctggaggtgtttgttattatctgttgatgcatctagttagtttgtataaataattatttcaatatactagttaaaattttaagattttaaatgtataaaaaactaataacgtttttatttgtaataggtgcattagcatcctattcgaataatgagtacactccgtttaataaactgagtgtaaaactctatatagatggagtagataatatagaaaattcatatactgatgataataatgaattggtgttaaattttaaagagtacacaatttctattattacagagtcatgcgacgtcggatttgattccatagatatagatgttataaacgactataaaattattgatatgtataccattgactcgtctactattcaacgcagaggtcacacgtgtagaatatctaccaaattatcatgccattatgataagtacccttatattcacaaatatgatggtgatgagcgacaatattctattactgcagagggaaaatgctataaaggaataaaatatgaaataagtatgatcaacgatgatactctattgagaaaacatactcttaaaattggatctacttatatatttgatcgtcatggacatagtaatacatattattcaaaatatgatttttaaaaatttaaaatatattatcacttcagtgacagtagtcaaataacaaacaacaccatgagatatattataattctcgcagttttgttcattaatagtatacatgctaaaataactagttataagtttgaatccgtcaattttgattccaaaattgaatggactggggatggtctatacaatatatcccttaaaaattatggcatcaagacgtggcaaacaatgtatacaaatgtaccagaaggaacatacgacatatccgcatttccaaagaatgatttcgtatctttctgggttaaatttgaacaaggcgattataaagtggaagagtattgtacgggactatgcgtcgaagtaaaaattggaccaccgactgtaacattgactgaatacgacgaccatatcaatttgtacatcgagcatccgtatgctactagaggtagcaaaaagattcctatttacaaacgcggtgacatgtgtgatatctacttgttgtatacggctaacttcacattcggagattctaaagaaccagtaccatatgatatcgatgactacgattgcacgtctacaggttgcagcatagactttgtcacaacagaaaaagtgtgcgtgacagcacagggagccacagaagggtttctcgaaaaaattactccatggagttcgaaagtatgtctgacacctaaaaagagtgtatatacatgcgcaattagatccaaagaagatgttcccaatttcaaggacaaaatggccagagttatcaagagaaaatttaatacacagtctcaatcttatttaactaaatttctcggtagcacatcaaatgatgttaccacttttcttagcatgcttaacttgactaaatattcataactaatttttattaatgatacaaaaacgaaataaaactgcatattatacactggttaacgcccttataggctctaaccattttcaagatgaggtccctgattatagtccttctgttcccctctatcatctactccatgtctattagacgatgtgagaagactgaagaggaaacatggggattgaaaatagggttgtgtataattgccaaagatttctatcccgaaagaactgattgcagtgttcatctcccaactgcaagtgaaggattgataactgaaggcaatggattcagggatatacgaaacaccgataaattataaaaaaagcaatgtgtccgctgtttccgttaataatactattttcgtaactggcggattattcataaataactctaatagcacgatcgtggttaacaatatggaaaaacttgacatttataaagacaaacaatggtcgattatagaaatgcctatggctagggtatatcacggcattgactcgacatttggaatgttatattttgccggaggtctatccgttaccgaacaatatggtaatttagagaaaaacaacgagatatcttgttacaatcctagaacgaataagtggtttgatatttcatatactatttataagatatccatatcatcattgtgtaaactaaataacgtcttctatgtatttagtaaggacattggatatgtggaaaagtatgatggtgcatggaagttagtacatgatcgtctccccgctataaaggcattatcaacttctccttattgattgaaaatgaaaatataaatagtttttatgtatagcagtattaccctatagttttattgcttactactaacatggatacagatgttacaaatgtagaagatatcataaatgaaatagatagagagaaagaagaaatactaaaaaatgtagaaattgaaaataataaaaacattaacaagaatcatcccaatgaatatattagagaagcactcgttattaataccagtagtaatagtgattccattgataaagaagttatagaatgtatcagtcacgatgtaggaatatagatcatatctactaatttttataatcgatacaaaacataaaaaacaactcgttattacatagcaggcatggaatccttcaagtattgttttgataacgatggcaagaaatggattatcggaaatactttatattctggtaattcaatactctataaggtcagaaaaaatttcactagttcgttctacaattacgtaatgaagatagatcacaaatcacacaagccattgttgtctgaaatacgattctatatatctgtattggatcctttgactatcgacaactggacacgggaacgtggtataaagtatttggctattccagatctgtatggaattggagaaaccgatgattatatgttcttcgttataaagaattcgggaagagtattcgccccaaaggatactgaatcagtcttcgaagcatgcgtcactatgataaacacgttagagtttatacactctcgaggatttacccatggaaaaatagaaccgaggaatatactgattagaaataaacgtctttcactaattgactattctagaactaacaaactatacaagagtggaaactcacatatagattacaacgaggacatgataacttcaggaaatatcaattatatgtgtgtagacaatcatcttggagcaacagtttcaagacgaggagatttagaaatgttgggatattgcatgatagaatggttcggtggcaaacttccatggaaaaacgaaagtagtataaaagtaataaaacaaaaaaaagaatataaaaaatttatagctactttctttgaggactgttttcctgaaggaaatgaacctctggaattagttagatatatagaattagtatacacgttagattattctcaaactcctaattatgacagactacgtaaactgtttatacaagattgaaattatattcttttttttatagagtgtggtagtgttacggatatctaatattaatattagactatctctatcgcgctacacgaccaatatcgattactatggatatcttctatgaaaggagagaatgtatttatttctccagcgtcaatctcgtcagtattgacaatactgtattatggagctaatggatccactgctgaacagctatcaaaatatgtagaaacggaggagaacacggataaggttagcgctcagaatatctcattcaaatccatgaataaagtatatgggcgatattctgccgtgtttaaagattcctttttgagaaaaattggcgataagtttcaaactgttgacttcactgattgtcgcactatagatgcaatcaacaagtgtgtagatatctttactgaggggaaaatcaatccactattggatgaaccattgtctcctagcaattagtgccgtatactttaaagcaaaatggttgacgccattcgaaaaggaatttaccagtgattatcccttttacgtatctccgacggaaatggtagacgtaagtatgatgtctatgtacggcaaggcatttaatcacgcatctgtaaaagaatcattcggcaacttttcaatcatagaactgccatatgttggagatactagtatgatggtcattcttccagacaagattgatggattagaatccatagaacaaaatctaacagatacaaattttaagaaatggtgtgactttatggatgctatgtttatagatgttcacattcccaagtttaaggtaacaggctcgtataatctggtggatactctagtaaagtcaggactgacagaggtgttcggttcaactggagattatagcaatatgtgtaatttagatgtgagtgtcgacgctatgatccacaaaacgtatatagatgtcaatgaagagtatacagaagcagctgcagcaacttctgtactagtggcagactgtgcatcaacaattacaaatgagttctgtgcagatcatccgttcatctatgtgattaggcatgttgatggaaaaattcttttcgttggtagatattgctctccgacaactaattgttaaccattttttttaaaaaaaatagaaaaaacatgtggtattagtgcaggtcgttgttcttccaattgcaattggtaagatgacggccaactttagtacccacgtcttttcaccacagcactgtggatgtgacagactgaccagtattgatgacgtcaaacaatgtttgactgaatatatttattggtcgtcctatgcataccgcaacaggcaatgcgctggacaattgtattccacactcctctcttttagagatgatgcggaattagtgttcatcgacattcgcgagctggtaaaaaatatgccgtgggatgatgtcaaagattgtacagaaatcatccgttgttatataccggatgagcaaaaaaccatcagagagatttcggccatcatcggactttgtgcatatgctgctacttactggggaggtgaagaccatcccactagtaacagtctgaacgcattgtttgtgatgcttgagatgctaaattacgtggattataacatcatattccggcgtatgaattgatgagttgtacatcttgacattttctttcttctcttctccctttcttctcttctcccttcctccctcttctccctttcccagaaacaaacttttttacccactataaaataaaatgagtatactacctattatatttcttcctatatttttttattcttcattcgttcagacttttaacgcgtctgaatgtatcgacaaagggcaatattttgcatcattcatggagttagaaaacgagccagtaatcttaccatgtcctcaaataaatacgctatcatccggatataatatattagatattttatgggaaaaacgaggagcggataatgatagaattataccgatagataatggtagcaatatgctaattctgaacccgacacaatcagactctggtatttatatatgcattaccacgaacgaaacctactgtgacatgatgtcgttaaatttgacaatcgtgtctgtctcagaatcaaatatagatcttatctcgtatccacaaatagtaaatgagagatctactggcgaaatggtatgtcccaatattaatgcatttattgctagtaacgtaaacgcagatattatatggagcggacatcgacgccttagaaataagagacttaaacaacggacacctggaattattaccatagaagatgttagaaaaaatgatgctggttattatacatgtgttttagaatatatatacggtggcaaaacatataacgtaaccagaattgtaaaattagaggtacgggatagaataataccttctactatgcaattaccagatggcattgtaacttcaataggtagtaatttgactattgcatgcagagtatcgttgagacctcccacaacggacaccgacgtcttttggataagtaatggtatgtattacgaagaagatgatggggacggaaacggtagaataagtgtagcaaataaaatctatatgaccgataagagacgtgttattacatcccggttaaacattaatcctgtcaaggaagaagatgctacaacgtttacgtgtatggcgtttactattcctagcatcagcaaaacagttactgttagtataacgtgaatgtatgttgttacatttccatgtcaattgagtttataagaatttttatacattatcttccaacaaacaattgacgaacgtattgctatgattaactcccacgatactatgcatattattaatcattaacttgcagactatacctagtgctattttgacatactcgtgttcttgtgtaattgcggtatctatattattaaagtacgtaaatctagctatagttttattatttaattttagataatataccgtctccttatttttaaaaattgccacatcctttattaaatcatgaatgggaatttctatgtcatcgttagtatattgtgaacaacaagagcagatatctataggaaagggtggaatgcgatacattgatctatgtagttttaaaacacacgcgaactttgaagaatttatataaatcattccatcgatacatccttctatgttgacatgtatatatccaggaattcttttattaatgtcaggaaatgtataaactaaaacattgcccgaaagcggtgcctctatctgcgttatatccgttcttaacttacaaaatgtaaccaatacctttgcatgacttgttttgttcggcaacgttagtttaaacttgacgaatggattaattacaatagcatgatccgcgcatctattaagtttttttactttaacgcccttgtatgtttttacagagactttatctaaatttctagtgcttgtatgtgttataaatataacgggatatagaaccgaatcacctaccttagatacccaattacattttatcagatccagataataaacaaattttgtcgccctaactaattctatattgttatatattttacaattggttatgatatcatgtaataacttggagtctaacgcgcatcgtcgtacgtttatacaattgtgatttagtgtagtatatctacacatgtatttttccgcactatagtattctggactagtgataaaactatcgttatatctgtcttcaatgaactcatcgagatattgctctctgtcatattcatacacctgcataaactttctagacatcttacaatccgtgttattttaggatcatatttacatatttacgggtatatcaaagatgttagattagttaatgggaatcgtctataataatgaatattaaacaattatatgaggacttttaccacaaagcatcataaaaatgagtcgtcgtctgatttatgttttaaatatcaaccgcaaatcaactcataaaatacaagagaatgaaatatatacatattttagtcattgcaatatagaccatacttctacagaacttgattttgtagttaaaaactatgatctaaacagacgacaacctgtaactgggtatactgcactacactgctatttgtataataattactttacaaacgatgtactgaagatattattaaatcatgacgtaaatgtaacgatgaaaaccagtagcggacgtatgcctgtttatatattgcttactagatgttgtaatatttcacatgatgtagtgatagatatgatagacaaagataaaaaccacttattacatagagactattccaacctattactagagtatataaaatctcgttacatgttattgaaggaagaggatatcgatgagaacatagtatccactttattagataagggaatcgatcctaactttaaacaagacggatatacagcgttacattattattatttgtgtctcgcacacgtttataaactaggtgagtgtagaaaaccgataacgataaaaaaggccaagcgaattatttctttgtttatacaacatggagctaatctaaacgcgttagataattgtggtaatacaccattccatttgtatcttagtattgaaatgtgtaataatattcatatgactaaaatgctgttgacttttaatccgaatttcaaaatatgtaataatcatggattaacgcctatactatgttatataacttccgactacatacaacacgatattcttgttatgttaatacatcactatgaaacaaatgttggagaaatgccgatagatgagcgtcgtatgatcgtattcgagtttatcaaaacatattctacacgtccggcagattcgataacttatttgatgaataggtttaaaaatataaatatttatacccgctatgaaggaaagacattattacacgtagcatgtgaatataataatacacaagtaatagattatcttatacgtatcaacggagatataaatgcgttaaccgacaataacaaacacgctacacaactcattatagataacaaagaaaattccccatataccattaattgtttactgtatatacttagatatattgtagataagaatgtgataagatcgttggtggatcaacttccatctctacctatcttcgatataaaatcatttgagaaattcatatcctactgtatacttttagatgacacattttacgataggcacgttaagaatcgcgattctaaaacgtatcgatacgcattttcaaaatacatgtcgtttgataaatacgatggtataataactaaatgtcacgacgaaacaatgttactcaaactgtccactgttctagacactacactatatgcagttttaagatgtcataattcgagaaagttaagaagatacctcaacgagttaaaaaaatataataacgataagtcctttaaaatatattctaatattatgaatgagagataccttaatgtatattataaagatatgtacgtgtcaaaggtatatgataaactatttcctgttttcacagataaaaattgtctactaacattactaccttcagaaattatatacgaaatattatacatgctgacaattaacgatctttataatatatcgtatccacctaccaaagtatagttgtatttttctcatgcgatgtgtgtaaaaaaactgatattatataaatattttagtgccgtataataaagatgacgatgaaaatgatggtacatatatatttcgtatcattattgttattgctattccacagttacgccatagacatcgaaaatgaaatcacagaattcttcaataaaatgagagatactctaccagctaaagactctaaatggttgaatccagcatgtatgttcggaggcacaatgaatgatatagccgctctaggagagccattcagcgcaaagtgtcctcctattgaagacagtcttttatcgcacagatataaagactatgtggttaaatgggagaggctagaaaagaatagacggcgacaggtttctaataaacgtgttaaacatggtgatttatggatagccaactatacatctaaattcagtaaccgtaggtatttgtgcaccgtaactacaaagaatggtgactgtgttcagggtatagttagatctcatattaaaaaacctccttcatgcattccaaaaacatatgaactaggtactcatgataagtatggcatagacttatactgtggaattctttacgcaaaacattataataatataacttggtataaagataataaggaaattaatatcgacgacattaagtattcacaaacgggaaaggaattaattattcataatccagagttagaagatagcggaagatacgactgttacgttcattacgacgacgttagaatcaagaatgatatcgtagtatcaagatgtaaaatacttacggttataccgtcacaagaccacaggtttaaactaatactagatccgaaaatcaacgtaacgataggagaacctgccaatataacatgcactgctgtgtcaacgtcattattgatcgacgatgtactgattgaatgggaaaatccatccggatggcttataggattcgattttgatgtatactctgttttaactagtagaggcggtatcaccgaggcgaccttgtactttgaaaatgttactgaagaatatataggtaatacatataaatgtcgtggacacaactattattttgaaaaaacccttacaactacagtagtattggagtaaatatacaatgcatttttatatacattactgaattattattactgaattattattactgaattattattaattatatcgtatttgtgctatagaatggatgaagatacgcgactatctaggtatttgtatctcaccgatagagaacatataaatgtagactctattaaacagttgtgtaaaatatcagatcctaatgcatgttatagatgtggatgtacggctttacatgagtacttttataattatagatcagtcaacggaaaatacaagtatagatacaacggttactatcaatattattcatctagcgattatgaaaattataatgaatattattatgatagaactggtatgaacagtgagagtgataatatatcaatcaaaacagaatatgaattctatgatgaaacacaagatcaaagtacacaactagtaggttacgacattaaactcaaaaccaatgaggatgattttatggctatgatagatcagtgggtgtccatgattatatagatgaatcaattaataaagtagtatatggaagagagtctcacgtaagatggcgggatatatggcaagaacataatgatggcgtatacagtataggaaaggagtgcatagataatatatacgaagacaaccataccgtagacgaattctacaagatagacagcgtatcagatgtagatgacgcggaacacatatctccgataactaaaaaaccatagaatcagttgatgataatacctacatttctaatcttccgtataccatcaaatacaaaatattcgagcaacaataagtattttttatacctttaaaactgataaataaattttttctagtgatattttggcaagatgagaatcctatttctcatcgctttcatgtatgggtgtgttcactcatatgttaacgcggttgaaaccaaatgtccaaatctagacattgtaacatcttctggagaatttcattgttcaggatgtgtggaacatatgcctgagtttagctatatgtattggttggcaaaggatatgaaatcggacgaggataccaagtttatagaacatctgggtgatggcatcaaagaagatgaaaccgttcgtaccacagatagtggaatcgtcactctacgtaaagtccttcatgtgactgatactaataaatttgataattataggttcacttgtgtcctcgctacgctagatggcatttataaaaagaatgtttgctgaagtagttgtgtgctactatttttatttatgatataatctaatggaattaatttgaattgatatttatccaatactaaagattatattagaatcaaattaatcttttatacgagaaaaaataacgacatacgtcgtcaacaaattaaactttttatttattagttaactagcttatagaacttgctcattgttatgtttctaaaacgggtacggcatataggacaattatccgacgcaccggtttctcttcgtgttctatgccatatattgatgcatgttatgcaaaatatatgagtacacgaatccaataaaccaaagtatctatcgttttgagtaaacaacttcatagcaaattccacattctttttctttacttactctatacacgtcctcgtatttatttagtattttgatgatatccaactcagaaatggttgttgtattattgggtgtatttggagtataggtattattagctatgtaccaatttaccaaccctcttaatattgattgataatcacatcggttatccaattaataactaaattgtagtgtatatatagaccatatatgtttctatttttttgacagttacgtatagtttcagtaagttttgattgttgtattcctgtatctctagataagttagtcatatagtcccttccggcgatacgttttttccaagcccgaaattgattagccaaatgtgtatttatttttgtgatattgatataatatttcggataatgcatactgttagtcttatatcatttggttcatctatgtattgtaatattgttacatgatctatagatgatgtattgattttggcaggatcgaattccatatccgcgactaaacagtgaaaaaaatgtaaatactttttaaattttaaattagtaaaacttttttttattttttatgattccaaaaatactgaatacaaagtcctaaattataaatatggagatcatactaccacaacttattattatgtatacaaggccggtgtaatagatagatatatataattctattacaccggcagacaattaccgaccggtatttgtcgttaccaacataccgtataatatgtaatatacaattccataacccattgacagttgttatacatcaaaattgcaattcttttgattacgatgttataagaatgtagttaattgatgtatgatgttaatgtgtcctctttcctcttataacatcgtaatcaaaaacttttttataatatatacctaataatgtgtcttaatagttctcgtgattcgtcaaacaatcattcttataaaatataataaagcaacgtaaaaacacataaaaataagcgtaactaataagacaatggatatttacgacgataaaggtctacagactattaaactgtttaataatgaatttgattgtataaggaatgacatcagagaattatttaaacatgtaactgattccgatagtatacaacttccgatggaagacaattctgatattatagaaaatatcagaaaaatactatatagacgattaaaaaatgtagaatgtgttgacatcgataacacaataacttttatgaaatacgatccaaatgatgataataagcgtacgtgttctaattgggtacccttaactaataactatatggaatattgtctagtaatatatttggaaacaccgatatgtggaggcaaaataaaattataccaccctacaggaaatataaagtcggataaggatattatgtttgcaaagactctagactttaaatcaacgaaagtgttaactggacgtaaaacaattgccgttctagacatatccgtttcatataatagatcaatgactactattcactacaacgacgacgttgatatagatatacatactgataaaaatggaaaagagttatgttattgttatataacaatagatgatcattacttggttgatgtggaaactataggagttatagtcaatagatctggaaaatgtctgttagtaaataaccatctaggtataggtatcgttaaagataaacgtataagcgatagttttggagatgtatgtatggatacaatatttgacttttctgaagcacgagagttattttcattaactaatgatgataacaggaatatagcatgggacactgataaactagacgatgatacagatatatggactcccgtcacagaagatgattacaaatttctttctagactagtattgtatgcaaaatctcaatcggatactgtatttgactattatgttcttactggtgatacggaaccacccactgtattcattttcaaggtaactagattttactttaatatgccgaaataaaaaatttttgtataatatctagaggtagaggtattgtttagataaatacaaataacatagatacatcgcatacttagcatttttataaatatacataagacatacactttatacatttttgtaaaaatactcataaaaaaatttataaaaattatggcacaaccatatcttgtataggtagtttagttcgtcgagtgaacctataaacagataatagacaacacataataatgcctactaatacaagcataataccgggagatgggatatatgacgttgtagtgtttgggttttctgaacgttgatagtctactaatactacatgctgacatctaatgcctgtataaccatgagagcatctacaatacataccgtcaatatctctagcgtggatacagtcaccgtgtaaacaatatccatctccctctggaccgcataatctgatagctggaatatctgttgtagcgtttgtaatttctggcaatgtcgtttcgatagcgttaccactatcggcgaatgatctgattatcatagcagcgaacaacaacatcagataatttatcaacatttttgatggattctgtgtttatgctgtttctcagtgtgtgtttatgacaagattgggaattttatattattaattcagtaatataaactaataatatattgttaattgtgtaaataatataaaaataacaatacaatattgaatgtgttgctgttaaaaatgtatgtgttaatataatagaataaaataaatgagtatgatcattttagataacgattgattttatcattaccgcttcattcttatattctttgcttacggaacctatatttagaaacatctactaacaattttttatgcttgcattattaatggtatgtaatatgattgattgtgtacgcaataccaatttgttaagtatgaatacggggtacaaacataaattgaaatttaacattatttatttatgatatatatcgttatcgttaggtctataccatggatatctttaaagaactaatcttaaaacaccctgatgaaaatgttttgatttctccagtttccattttatctactttatctattctaaatcatggagcagctggttctacagctgaacaactatcaaaatatatagagaatatgaatgagaatacacccgatgacaataatgatgacatggaggtagatattccgtattgtgcgacactagctaccgcaaataaaatatacggtagcgatagtatcgagttccacgcctccttcctacaaaaaataaaagacgattttcaaactgtaaactttaataatgctaaccaaacaaaggaactaatcaacgaatgggttaagacaatgacaaatggtaaaattaattccttattgactagtccgctatccattaatactcgtatgacagttgttagcgccgtccattttaaagcaatgtggaaatatccattttctaaacatcttacatatacagacaagttttatatttctaagaatatagttaccagcgttgatatgatggtgggtaccgagaataacttgcaatatgtacatattaatgaattattcggaggattctctattatcgatattccatacgagggaaactctagtatggtaattatactaccggacgacatagaaggtatatataacatagaaaaaaatataacagatgaaaaatttaaaaaatggtgtggtatgttatctactaaaagtatagacttgtatatgccaaagtttaaagtggaaatgacagaaccgtataatctggtaccgattttagaaaatttaggacttactaatatattcggatattatgcagattttagcaagatgtgtaatgaaactatcactgtagaaaaatttctacatacgacgtttatagatgttaatgaggagtatacagaagcatcggccgttacaggagtatttacgattaacttttcgatggtatatcgtacgaaggtctacataaaccatccattcatgtacatgattaaagacaccacaggacgtatactttttatagggaaatactgctatccgcaataaatataaacaaatagacttttataaagagtcttcaacgataagtatatcgacatactacttatgctgcgaaagattctgaacgagaacgactatctcaccctcttggatcatatccgcactgctaaatactaaatctccactacactttttatcatcttatgaggaatgattgccttcgtgaaataggaataattagcaccagaatagctatggattattgtggtagagagtgcactattctatgtcgtctactggatgaagatgtgacgtacaaaaaaataaaactagaaattgaaacgtgtcacaacttatcaaaacatatagatagacgaggaaacaatgcgctacattgttacgtctccaataaatgcgatacagacattaagattgttctctcgcggagtcgagagactttgtagaaacaacgaaggattaactccgctaggagtatacagtaagcatagatacgtaaaatctcagattgtgcatctactgatatccagctattcaaattcctctaacgaactcaagtcgaatataaatgatttcgatctgtattcggataatatcgacttacgtctgctaaaatacctaattgtggataaacggatacgtccgtccaagaatacgaattatgcaatcaatggtctcggattggtggatatatacgtaacgacgcctaatccgagaccagaagtattgctatggcttcttaaatcagaatgttacagcaccggttacgtatttcgtacctgtatgtacgacagtgatatgtgtaagaactctcttcattactatatatcgtctcatagagaatctcaatctctatccaaggatgtaattaaatgtttgatcgataacaatgtttccatccatggcagagacgaaggaggatctttacccatccaatactactggtctttctcaaccatagatatagagattgttaaattattattaataaaggatgtggacacgtgtagagtatacgacgtcagccctatattagaggcgtattatctaaacaagcgatttagagtaaccccatataatgtagacatggaaatcgttaatcttcttattgagagacgtcatactcttgtcgacgtaatgcgtagtattacttcgtacgattccagagaatataaccactacatcatcgataacattctaaagagatttagacaacaggatgaatccatcgtacaagccatactgataaactacttacattacggcgatatggtcgttcgatgcatgttagataacggacaacaactatcctctacacgactactttgttaataataatctcgtcgatgtaaacgtcgtaaggtttatcgtggaaaatatggacacgcggctgtaaatcacgtatcgaacaatggccgtctatgtatgtacggtctgatattatcgagatttaataattgcgggtatcactgttatgaaaccatactgatagatgtatttgatatactaagcaagtacatggatgatatagatatgatcgataactctactatattacgcggtcgatgtcaataatatacaatttgcaaagcggttattggaatatggagcgagtatcacgctcgataatcaatacggccatccagaaaagcagttacagaagagaaaacaaaacgaaatcgttgttctacaagatgtctctccctacgacgattactacgtaaaaaagatactagcctactgcctattaagggacgagtcattcgcggaactacatagtaaattctgtttaaacgaggactataaaagtgtatttatgaaaaatatatcattcgataagatagattccatcatcgtgacataagtcgcctcaaagagattcgaatctccgacaccgacctgtatacggtatcacagctatcttaaagccatacattcagacagtcacatttcatttcccatgtacgacgatctcatagaacagtgccatctatcgatggagcgtaaaagtaaactcgtcgacaaagcactcaataaattagagtctaccatcggtcaatctagactatcgtatttgcctccggaaattatgcgcaatatcatctaaacagtatgttgtacggaaagaaccattacaaatattatccatgatagaaagaaaatatctatatgattggagaagtaggaaacaggaacaagacaacgattactacattattaaatcatgaagtccgtattatactcgtatatattgtttctctcatgtataataataaacggaagagatatagcaccgcatgcaccatccgatggaaagtgtaaagacaacgaatacaaacgccataatttgtgtccgggaacatacgcttccagattatgcgatagcaagactaacacacgatgtacgccgtgtggttcgggtaccttcacatctcgcaataatcatttacccgcttgtctaagttgtaacggaagacgcgatcgtgtaacacgactcacaatagaatctgtgaatgctctcccggatattattgtcttctcaaaggatcatccggatgcaaggcatgtgtttcccaaacaaaatgtggaataggatacggagtatccggagacgtcatctgttctccgtgtggtctcggaacatattctcacaccgtctcttccgcagataaatgcgaacccgtacccagaaatacgtttaactatatcgatgtggaaattaacctgtatccagttaacgacacgtcgtgtactcggacgaccactaccggtctcagcgaatccatctcaacgtcggaactaactattactatgaatcataaagactgtaatcccgtatttcgtgatggatacttctccgttcttaataaggtagcgacttcaggtttctttacaggagaaaggtgtgcactctgaatttcgagattaaatgcaataacaaagattcttcctccaaacagttaacgaaagcaaagaatgatactatcatgccgcattcggagacagtaactctagtgggcgacatctatatactatatagtaataccaatactcaagactacgaaactgatacaatctcttatcatgtgggtaatgttctcgatgtcgatagccatatgcccggtagttgcgatatacataaactgatcactaattccaaacccacccactttttatagtaagtttttcacccataaataataaatacaataattaatttctcgtaaaagtagaaaatatattctaatttattgcacggtaaggaagtagaatcataaagaacagtactcaatcaatagcaattatgaaacaatatatcgtcctggcatgcatgtgcctggcggcagctgctatgcctgccagtcttcagcaatcatcctcatcctcctcctcgtgtacggaagaagaaaacaaacatcatatgggaatcgatgttattatcaaagtcacaaagcaagaccaaacaccgaccaatgataagatttgccaatccgtaacggaaattacagagtccgagtcagatccagatcccgaggtggaatcagaagatgattccacatcagtcgaggatgtagatcctcctaccacttattactccatcatcggtggaggtctgagaatgaactttggattcaccaaatgtcctcagattaaatccatctcagaatccgctgatggaaacacagtgaatgctagattgtccagcgtgtccccaggacaaggtaaggactctcccgcgatcactcatgaagaagctcttgctatgatcaaagactgtgaagtgtctatcgacatcagatgtagcgaagaagagaaagacagcgacatcaagacccatccagtactcgggtctaacatctctcataagaaagtgagttacgaagatatcatcggttcaacgatcgtcgatacaaaatgcgtcaagaatctagagtttagcgttcgtatcggagacatgtgcaaggaatcatctgaacttgaggtcaaggatggattcaagtatgtcgacggatcggcatctgaaggtgcaaccgatgatacttcactcatcgattcaacaaaactcaaagcgtgtgtctgaatcgataactctattcatctgaaattggatgagtagggttaatcgaacgattcaggcacaccacgaattaaaaaagtgtaccggacactatattccggtttgcaaaacaaaaatgttcttaactacattcacaaaaagttacctctcgcgacttcttctttttctgtctcaatagtgtgatacgattatgacactattcctattcctattcctatttcctttcagagtatcacaaaaatattaaacctctttctgatggtctcataaaaaaagttttacaaaaatatttttattctctttctctctttgatggtctcataaaaaaagttttacaaaaatatttttattctctttctctctttgatggtctcataaaaaaagttttacaaaaatatttttattctctttctctctttgatggtctcataaaaaaagttttacaaaaatatttttattctctttctctctttgatggtctcataaaaaaagttttacaaaaatatttttattctctttctctctttgatggtctcataaaaaaagttttacaaaaatatttttattctctttctctctttgatggtctcataaaaaaagttttacaaaaatatttttattctctttctctctttgatggtctcataaaaaaagttttacaaaaatatttttattctctttctctctttgatggtctcataaaaaaagttttacaaaaatatttttattctctttctctctttgatggtctcataaaaaaagttttacaaaaatatttttattctctttctctctttgatggtctcataaaaaaagttttacaaaaatatttttattctctttctctctttgatggtctcataaaaaaagttttacaaaaatatttttattctctttctctctttgatggtctcataaaaaagttttacaaaaatatttttattctctttctctctttgatggtctcataaaaaagttttacaaaaatatttttattctctttctctctttgatggtctcataaaaaaagttttacaaaaatatttttattctctttctctctttgatggtctcataa

(The sequence listing continues in the following parts.)
